(19) United States
(12) Patent Application Publication
(10) Pub. No.: US 2005/0260659 A1
(43) Pub. Date: Nov. 24, 2005

(54) Compositions and methods for breast cancer prognosis

(75) Inventors: Cole Harris, Albuquerque, NM (US); Lisa Davis, Albuquerque, NM (US)

Correspondence Address: MCDONNELL BOEHNEN HULBERT & BERGHOFF LLP, 300 S. WACKER DRIVE, 32ND FLOOR, CHICAGO, IL, 60606, US

(73) Assignee: Exagen Diagnostics, Inc.

(21) Appl. No.: 11/112,908

(22) Filed: Apr. 22, 2005

Related U.S. Application Data
(60) Provisional application No. 60/564,758, filed on Apr. 23, 2004.
(60) Provisional application No. 60/575,978, filed on Jun. 1, 2004.
(60) Provisional application No. 60/631,702, filed on Nov. 30, 2004.
(60) Provisional application No. 60/633,826, filed on Dec. 7, 2004.

(51) Int. Cl. C12Q 1/68; C07H 21/04

(52) U.S. Cl. 435/6; 536/24.3

(57) ABSTRACT

The present invention provides novel compositions and their use in classifying breast tumors.

### CROSS REFERENCE

[0001] The application claims priority to U.S. Provisional Patent Application Ser. Nos. 60/564,758 filed Apr. 23, 2004; 60/575,978 filed Jun. 1, 2004; 60/631,702 filed Nov. 30, 2004; and 60/633,826 filed Dec. 7, 2004.

### INCORPORATION BY REFERENCE

[0002] A compact disc submission containing a Sequence Listing is hereby expressly incorporated by reference. The submission includes two compact discs (“COPY 1” and “COPY 2”), which are identical in content. Each disc contains the file entitled 04-164-US SeqListing.ST25.txt,” 10.6 MB in size, created Apr. 22, 2005.

[0003] 1. Field of the Invention

[0004] The invention relates generally to the fields of nucleic acids, nucleic acid detection, cancer, and breast cancer.

[0005] 2. Background

[0006] Breast cancer is the most common cancer in women and the second most common cause of cancer death in the United States. While germ line mutations in BRCA1 or BRCA2 genes predispose women with the mutations to breast cancer, only about 5-10% of breast cancers are associated with these breast cancer susceptibility genes. Currently employed clinical indicators of breast cancer prognosis are not accurate in identifying patients likely to have a favorable outcome. As a result, many more patients are subjected to adjuvant chemotherapy than will benefit from such treatment (US 20040058340 published Mar. 25, 2004).

[0007] Tumors not currently known to be associated with a germline mutation (“sporadic tumors”) constitute the majority of breast cancers (US 20040058340). Due to the increased morbidity and mortality if breast cancer is not detected early in its progression, considerable effort has been devoted to early detection of breast tumor development.

[0008] Breast cancer diagnosis typically requires histopathological proof of tumor presence. Histopathological examinations also provide information about prognosis and help guide selection of treatment regimens. Prognosis may also be established based upon parameters such as tumor size, tumor grade, the age of the patient, and lymph node metastasis (US 20040058340).

[0009] Accurate prognosis or determination of distant metastasis-free survival in breast cancer patients would permit selective administration of adjuvant chemotherapy, with women having poorer prognoses being given the most aggressive treatment.

[0010] The maturation of microarray technology has enabled the routine collection of genome-wide gene expression (RNA) data. Several authors have shown that microarray data collected from tumors may be useful in differential diagnosis, tumor staging and prognosis. The data produced by these studies ideally represents a valuable resource for the development of new diagnostics. However, current microarray technologies require sample collection and preparation steps that inhibit routine clinical adoption.

[0011] In contrast, DNA-based markers are commonly used in cancer diagnostics. Diagnostic implementations utilizing fluorescence in situ hybridization (FISH) and RT-PCR technology are in widespread use. New diagnostic products based on such accepted technology will more quickly find clinical acceptance.

[0012] It is established that specific genetic aberrations are often associated with clinical characteristics. Examples include the association of 1p/19q deletions in breast cancers with improved response to chemotherapy, and the association of 8q gain with poor prognosis in prostate cancer. Such aberrations have been detected with comparative genomic hybridization (“CGH”). However, the relationship between tumor karyotype and phenotype is often subtle, and may be difficult to determine from the typically available datasets consisting of low-resolution CGH data collected from a small number of samples.

[0013] Several studies have demonstrated the association of genetic aberrations with gene expression changes. In independent studies, Hyman et al (Cancer Res. 2002, Nov 1:62(21):6240-5, 2002) and Pollack et al (Proc Natl Acad Sci USA 2002 Oct. 1; 99(20):12963-8) have found a strong relationship between high amplification and high expression in breast tumors. Crawley et al (Genome Biol. 2002; 3(12):RESEARCH0075. Epub 2002 Nov. 25) have reported on a data analysis method that accurately predicts regions of copy number aberrations in hepatocellular carcinomas using only gene expression data. These investigations support the notion that gene expression data can be used as a window to the underlying genetic defects, and thus the idea that a combined analysis of gene expression data and CGH copy number data with the aim of identifying DNA markers is viable.

[0014] Currently employed clinical indicators of breast cancer prognosis are not accurate in identifying patients likely to have a favorable outcome. As a result, many more patients are subjected to adjuvant chemotherapy than will benefit from such treatment. Thus, there remains a need in the art for better and more specific clinical predictors of breast cancer prognosis.

### SUMMARY OF THE INVENTION

[0015] The present invention provides novel compositions and their use in classifying breast tumors.

[0016] In a first aspect, the present invention provides compositions comprising or consisting of a breast cancer biomarker, wherein the breast cancer biomarker comprises or consists of between 2 and 35 different probe sets, wherein at least 40% of the different probe sets comprise or consist of one or more isolated polynucleotides that selectively hybridize to a genomic region selected from the group consisting of 3p23, 8q21.13, 8q22.1, 8q22.2, 8q24.11, 10q22.3, 16q24.3, 17q11.2, 17q12, 17q21.1, 17q22.2, 17q25.3, 19q13.12, and 20q13.2; wherein the different probe sets in total selectively hybridize to at least two of the recited genomic regions.

[0017] In a second aspect, the invention provides compositions comprising a breast cancer biomarker comprising or consisting of between 2 and 42 different probe sets, wherein at least 40% of the different probe sets comprise or consist of one or more isolated polynucleotides that selectively hybridize to an isolated nucleic acid according to formula 1:
X1-X2-X3;
[0018] wherein X2 is a human genomic insert contained within a bacterial artificial chromosome (“BAC”), and is selected from the group consisting of SEQ ID NOS: 18-65 (see Table 1) or their complement, wherein X1 and X3 are independently 0-500 kB of human genomic nucleic acid flanking X2 in the human genome; and
[0019] wherein the different polynucleotide probe sets in total selectively hybridize to at least two non-overlapping nucleic acids according to formula 1.

[0020] In a third aspect, the present invention provides compositions comprising a breast cancer biomarker comprising or consisting of between 2 and 42 different probe sets, wherein at least 40% of the different probe sets comprise or consist of one or more isolated polynucleotides that selectively hybridize to a nucleic acid according to one of SEQ ID NO:1-17 or complements thereof; wherein the different probe sets in total selectively hybridize to at least two of the recited nucleic acids according to SEQ ID NO:1-17 or complements thereof.

[0021] In a further aspect, the present invention provides methods for classifying a breast tumor, comprising
[0022] (a) contacting a nucleic acid sample obtained from a subject having a breast tumor with polynucleotide probes that, in total, selectively hybridize to two or more genomic regions selected from the group consisting of 3p23, 8q21.13, 8q22.1, 8q22.2, 8q24.11, 10q22.3, 16q24.3, 17q11.2, 17q12, 17q21.1, 17q22.2, 17q25.3, 19q13.12, and 20q13.2; wherein the contacting occurs under conditions to promote selective hybridization of the polynucleotides of the probe set to the two or more genomic regions;
[0023] (b) detecting formation of hybridization complexes;
[0024] (c) determining whether one or more of the genomic regions are present in an altered copy number in the nucleic acid sample; and
[0025] (d) correlating an altered copy number of one or more of the genomic regions with a breast cancer classification.

[0026] In a further aspect, the present invention provides methods for classifying a breast tumor comprising:
[0027] (a) contacting a mRNA-derived nucleic acid sample obtained from a subject having a breast tumor with nucleic acid probes that, in total, selectively hybridize to two or more nucleic acid targets selected from the group consisting of SEQ ID NO:1-17 or complements thereof; wherein the contacting occurs under conditions to promote selective hybridization of the nucleic acid probes to the nucleic acid targets, or complements thereof, present in the nucleic acid sample;
[0028] (b) detecting formation of hybridization complexes between the nucleic acid probes to the nucleic acid targets, or complements thereof, wherein a number of such hybridization complexes provides a measure of gene expression of the one or more nucleic acids according to SEQ ID NO:1-17; and
[0029] (c) correlating an alteration in gene expression of the one or more nucleic acids according to SEQ ID NO:1-17 relative to control with a breast cancer classification.

### DETAILED DESCRIPTION OF THE INVENTION

[0030] All publications, GenBank Accession references, references to bacterial artificial chromosome (“BAC”) accession numbers (sequences), patents and patent applications cited herein are hereby expressly incorporated by reference for all purposes.

[0031] Within this application, unless otherwise stated, the techniques utilized may be found in any of several well-known references such as: Molecular Cloning: A Laboratory Manual (Sambrook, et al., 1989, Cold Spring Harbor Laboratory Press), Gene Expression Technology (Methods in Enzymology, Vol. 185, edited by D. Goeddel, 1991. Academic Press, San Diego, Calif.), “Guide to Protein Purification” in Methods in Enzymology (M. P. Deutshcer, ed., (1990) Academic Press, Inc.); PCR Protocols: A Guide to Methods and Applications (Innis, et al. 1990. Academic Press, San Diego, Calif.), Culture of Animal Cells: A Manual of Basic Technique, 2^{nd} Ed. (R. I. Freshney. 1987. Liss, Inc. New York, N.Y.), Gene Transfer and Expression Protocols, pp. 109-128, ed. E. J. Murray, The Humana Press Inc., Clifton, N.J.), and the Ambion 1998 Catalog (Ambion, Austin, Tex.).

[0032] The present invention provides novel compositions and methods for their use in classifying breast tumors. As used herein, the term “classifying” means to determine one or more features of the breast tumor or the prognosis of a patient from whom a breast tissue sample is taken, including the following:
[0033] (a) Diagnosis of breast cancer (benign vs. malignant tumor);
[0034] (b) Metastatic potential, potential to metastasize to specific organs, or course of the tumor;
[0035] (c) Stage of the tumor;
[0036] (d) Patient prognosis in the absence of chemotherapy or hormonal therapy;
[0037] (e) Prognosis of patient response to treatment (chemotherapy, radiation therapy, and/or surgery to excise tumor)
[0038] (f) Predicted optimal course of treatment for the patient;
[0039] (g) Prognosis for patient relapse after treatment; and
[0040] (h) Patient life expectancy.

[0041] Prior art methods for marker-based prognosis have either focused on (a) analysis of expression or copy number of single genes or genomic regions, which is likely to be relevant for only a small subset of tumors; or on (b) analysis of a large array of many genes or genomic regions, which is impractical for use in clinical diagnostic laboratories and most research facilities.

[0042] The compositions of the present invention are identified herein as being useful markers for breast cancer classification, and are defined relative to the following nucleic acid sequences:
[0043] 1. GENBANK ACCESSION AL080059 (SEQ ID NO:1)
[0044] 2. GENBANK ACCESSION NM_{—}006281 (SEQ ID NO:2): Serine/threonine kinase 3 (“stk3”)
[0045] 3. GENBANK ACCESSION NM_{—}000127 (SEQ ID NO:3): Exostoses 1 (“ext1”)
[0046] 4. GENBANK ACCESSION NM_{—}006265 (SEQ ID NO:4): “rad21” (AKA “HR21”; “SCC1”; “NXP1”)
[0047] 5. GENBANK ACCESSION NM_{—}001157 (SEQ ID NO:5): Annexin All (“anxa11”)
[0048] 6. GENBANK ACCESSION NM_{—}000135 (SEQ ID NO:6): Fanconi anemia complementation group A (“fanca”)
[0049] 7. GENBANK ACCESSION NM_{—}007144 (SEQ ID NO:7): zinc finger protein 110 (RF110) (“znfl44”)
[0050] 8. GENBANK ACCESSION NM_{—}003079 (SEQ ID NO:8): SWI/SNF related, matrix-associated, actin dependent regulator of chromatin, subfamily e, member 1 (“smarce”)
[0051] 9. GENBANK ACCESSION NM_{—}001168 (SEQ ID NO:9): Baculoviral IAP-repeat containing 5 (“birc 5”; AKA: “survivin”)
[0052] 10. GENBANK ACCESSION NM_{—}013374 (SEQ ID NO:10): Programmed cell death interacting protein (PDCD6IP)
[0053] 11. GENBANK ACCESSION NM_{—}005310 (SEQ ID NO:11): Growth factor receptor-bound protein 7 (“GRB7”))
[0054] 12. GENBANK ACCESSION NM_{—}006804 (SEQ ID NO:12): Start domain containing 3 (“MLN64”)(also called STARD3)
[0055] 13. GENBANK ACCESSION NM_{—}005536 (SEQ ID NO:13): inositol(myo)-1(or 4)-monophosphatase 1 (“IMPA1”)
[0056] 14. GENBANK ACCESSION NM_{—}002151 (SEQ ID NO:14): (“Hepsin”)
[0057] 15. GENBANK ACCESSION X72631 (SEQ ID NO:15): hrev gene (“nr1d1”)
[0058] 16. GENBANK ACCESSION NM_{—}003457 (SEQ ID NO:16): zinc finger protein 207 (“ZNF207”)
[0059] 17. GENBANK ACCESSION NM_{—}000782 (SEQ ID NO:17): cytochrome P450, family 24, subfamily A, polypeptide1 (“CYP24”)

[0060] While statistically significant, the inventors believe that the clinical diagnostic and prognostic utility of subsets of these seventeen gene markers is greater than the clinical diagnostic and prognostic utility of individual genes. Such combinations may better classify the complexity of genomic aberrations associated with particular phenotypes in breast cancer.

[0061] Many studies have demonstrated that when genomic regions are amplified (as in a tumor), the amplified region (“amplification”) most commonly consists of a number of genes, in spite of the tendency to describe an amplification in terms of a single gene. (Barlund et al., Cancer Res. 2000 Oct. 1; 60(19):5340-4; Kauraniemi et al., Cancer Res. 2001 Nov. 15; 61(22):8235-40; Pollack et al., 2002; Hyman et al., Cancer Res. 2002 Nov. 1; 62(21):6240-5; Monni et al., Proc. Natl. Acad. Sci. USA 2001 May 8; 98(10):5711-6). For example, a “her-2” amplification generally contains the her-2 gene and many flanking genes.

[0062] Physical distances between the genes used in these studies, as described in publicly available databases (for example, UCSC human genome www.genome.ucsc.edu) reveals that, while the sizes of amplifications vary among tumors, the size of an “average” amplification is reasonably estimated as at least 1 megabase.

[0063] Thus, in a first aspect, the present invention provides compositions comprising or consisting of a breast cancer biomarker, wherein the breast cancer biomarker comprises or consists of between 2 and 35 different probe sets, wherein at least 40% of the different probe sets comprise or consist of one or more isolated polynucleotides that selectively hybridize to a genomic region selected from the group consisting of 3p23, 8q21.13, 8q22.1, 8q22.2, 8q24.11, 10q22.3, 16q24.3, 17q11.2, 17q12, 17q21.1, 17q22.2, 17q25.3, 19q13.12, and 20q13.2; wherein the different probe sets in total selectively hybridize to at least two of the recited genomic regions.

[0064] The recited genomic regions correspond to the chromosome band of the markers. The compositions of the invention can be used, for example, to provide improved breast cancer classification over that possible using prior art diagnostic and predictive compositions and methods. Table 1 provides a detailed summary of the individual markers, their GenBank accession number, genomic region at which the markers are located, and the names and SEQ ID NOS. of bacterial artificial chromosomes (“BAC”) that contain the marker (discussed in more detail below).

TABLE 1

| Accession | gene name and | | | BAC SEQ ID | Insert size |
|---|---|---|---|---|---|
| Number | SEQ ID NO | BAC name | Chromosome | NO | (nucleotides) |
| AL080059 | AL080059 | RP11-499K24 | 8q22.1 | (SEQ ID | 165883 |
| | (SEQ ID NO: 1) | | | NO: 18) | |
| NM_006281 | STK3 | RP11-159A16 | 8q22.2 | (SEQ ID | 212805 |
| | (SEQ ID NO: 2) | | | NO: 19) | |
| | | RP11-765K18 | 8q22.2 | (SEQ ID | 191331 |
| | | | | NO: 20) | |
| | | RP11-563E23 | 8q22.2 | (SEQ ID | 207908 |
| | | | | NO: 21) | |
| | | RP11-613I24 | 8q22.2 | (SEQ ID | 172147 |
| | | | | NO: 22) | |
| | | RP11-44N12 | 8q22.2 | (SEQ ID | 188682 |
| | | | | NO: 23) | |
| NM_000127 | EXT1 | RP11-486B24 | 8q24.11 | (SEQ ID | 150314 |
| | (SEQ ID NO: 3) | | | NO: 24) | |
| | | RP11-96F23 | 8q24.11 | (SEQ ID | 172781 |
| | | | | NO: 25) | |
| | | RP11-24C23 | 8q24.11 | (SEQ ID | 150173 |
| | | | | NO: 26) | |
| | | RP11-601K03 | 8q24.11 | (SEQ ID | 171247 |
| | | | | NO: 27) | |
| | | RP11-742D20 | 8q24.11 | (SEQ ID | 166020 |
| | | | | NO: 28) | |
| | | RP11-453O16 | 8q24.11 | (SEQ ID | 131855 |
| | | | | NO: 29) | |
| | | RP11-208A09 | 8q24.11 | (SEQ ID | 143389 |
| | | | | NO: 30) | |
| | | RP11-346L16 | 8q24.11 | (SEQ ID | 207600 |
| | | | | NO: 31) | |
| NM_006265 | RAD21 | RP11-367C15 | 8q24.11 | (SEQ ID | 193363 |
| | (SEQ ID NO: 4) | | | NO: 32) | |
| NM_001157 | ANXA11 | RP11-529C24 | 10q22.3 | (SEQ ID | 217623 |
| | (SEQ ID NO: 5) | | | NO: 33) | |
| | | RP11-668E21 | 10q22.3 | (SEQ ID | 197781 |
| | | | | NO: 34) | |
| NM_000135 | FANCA | RP11-354M24 | 16q24.3 | (SEQ ID | 127340 |
| | (SEQ ID NO: 6) | | | NO: 35) | |
| | | RP11-364G13 | 16q24.3 | (SEQ ID | 98345 |
| | | | | NO: 36) | |
| NM_007144 | ZNF144 | RP11-610D13 | 17q12 | (SEQ ID | 150481 |
| | (SEQ ID NO: 7) | | | NO: 37) | |
| | | RP11-607B02 | 17q12 | (SEQ ID | 171162 |
| | | | | NO: 38) | |
| | | RP11-15P20 | 17q12 | (SEQ ID | 179892 |
| | | | | NO: 39) | |
| NM_003079 | SMARCE1 | RP11-372J02 | 17q21.2 | (SEQ ID | 180862 |
| | (SEQ ID NO: 8) | | | NO: 40) | |
| NM_001168 | BIRC5 | RP11-141D15 | 17q25.3 | (SEQ ID | 177623 |
| | (SEQ ID NO: 9) | | | NO: 41) | |
| | | RP11-219G17 | 17q25.3 | (SEQ ID | 155515 |
| | | | | NO: 42) | |
| | | RP11-586J16 | 17q25.3 | (SEQ ID | 159660 |
| | | | | NO: 43) | |
| NM_013374 | PDCD6IP | RP11-683H06 | 3p23 | (SEQ ID | 150437 |
| | (SEQ ID NO: 10) | | | NO: 44) | |
| | | RP11-795G20 | 3p23 | (SEQ ID | 182314 |
| | | | | NO: 45) | |
| | | RP11-637B24 | 3p23 | (SEQ ID | 150491 |
| | | | | NO: 46) | |
| NM_005310 | GRB7 | RP11-563O04 | 17q12 | (SEQ ID | 166111 |
| | (SEQ ID NO: 11) | | | NO: 47) | |
| | | RP11-94L15 | 17q12 | (SEQ ID | 161726 |
| | | | | NO: 48) | |
| | | RP11-610O22 | 17q12 | (SEQ ID | 149419 |
| | | | | NO: 49) | |
| NM_006804 | STARD3 | RP11-689B15 | 17q12 | (SEQ ID | 170189 |
| | (SEQ ID NO: 12) | | | NO: 50) | |
| | | RP11-62N23 | 17q12 | (SEQ ID | 157224 |
| | | | | NO: 51) | |
| | | RP11-94L15 | 17q12 | (SEQ ID | 161726 |
| | | | | NO: 52) | |
| NM_005536 | IMPA1 | RP11-67F19 | 8q21.13 | (SEQ ID | 191343 |
| | (SEQ ID NO: 13) | | | NO: 53) | |
| | | RP11-34M16 | 8q21.13 | (SEQ ID | 150450 |
| | | | | NO: 54) | |
| NM_002151 | HEPSIN | RP11-737K14 | 19q13.12 | (SEQ ID | 193789 |
| | (SEQ ID NO: 14) | | | NO: 55) | |
| | | RP11-233I16 | 19q13.12 | (SEQ ID | 150468 |
| | | | | NO: 56) | |
| X72631 | NR1D1 | RP11-278E15 | 17q21.1 | (SEQ ID | 161994 |
| | (SEQ ID NO: 15) | | | NO: 57) | |
| | | RP11-735P18 | 17q21.1 | (SEQ ID | 170285 |
| | | | | NO: 58) | |
| | | RP11-749I16 | 17q21.1 | (SEQ ID | 168656 |
| | | | | NO: 59) | |
| NM_003457 | ZNF207 | RP11-299H03 | 17q11.2 | (SEQ ID | 171427 |
| | (SEQ ID NO: 16) | | | NO: 60) | |
| | | RP11-634A23 | 17q11.2 | (SEQ ID | 159497 |
| | | | | NO: 61) | |
| NM_000782 | CYP24A1 | RP11-92B18 | 20q13.2 | (SEQ ID | 170508 |
| | (SEQ ID NO: 17) | | | NO: 62) | |
| | | RP11-310L22 | 20q13.2 | (SEQ ID | 149111 |
| | | | | NO: 63) | |
| | | RP11-234K07 | 20q13.2 | (SEQ ID | 157230 |
| | | | | NO: 64) | |
| | | RP11-114N21 | 20q13.2 | (SEQ ID | 173115 |
| | | | | NO: 65) | |

[0065] Thus, the compositions of each aspect and embodiment of the present invention are useful, for example, in classifying human breast cancers. The compositions can be used, for example, to identify one or more genomic regions as present in an abnormal copy number (for example, more than two copies of the gene per cell in a chromosome spread or fewer than two copies) in a nucleic acid sample from a human specimen, such as breast tissue from a human subject, which provides a classification of the breast tumor as discussed above and below. Alternatively, certain embodiments of the compositions (as discussed in more detail below) can be used to determine the expression levels in tissue of the mRNA encoded by the genes recited above.

[0066] The compositions according to each of the aspects and embodiments of the invention provide an improvement over prior art breast cancer classification compositions, which require a much larger number of probes to classify a breast tumor, and do so with reduced accuracy compared to the breast cancer biomarker of the present invention. As a result, the compositions of the present invention are much more amenable to use in clinical diagnostic and prognostic testing than are prior art compositions and their use in methods for breast cancer classification.

[0067] The term “polynucleotide” as used herein with respect to each aspect and embodiment of the invention refers to DNA or RNA, preferably DNA, in either single- or double-stranded form. It includes the recited sequences as well as their complementary sequences, which will be clearly understood by those of skill in the art. The term “polynucleotide” encompasses nucleic acids containing known analogues of natural nucleotides which have similar or improved binding properties, for the purposes desired, as the disclosed polynucleotides. The term also encompasses nucleic-acid-like structures with synthetic backbones. DNA backbone analogues provided by the invention include phosphodiester, phosphorothioate, phosphorodithioate, methylphosphonate, phosphoramidate, alkyl phosphotriester, sulfamate, 3′-thioacetal, methylene(methylimino), 3′-N-carbamate, morpholino carbamate, and peptide nucleic acids (PNAs), methylphosphonate linkages or alternating methylphosphonate and phosphodiester linkages (Strauss-Soukup (1997) Biochemistry 36:8692-8698), and benzylphosphonate linkages, as discussed in U.S. Pat. No. 6,664,057; see also Oligonucleotides and Analogues, a Practical Approach, edited by F. Eckstein, IRL Press at Oxford University Press (1991); Antisense Strategies, Annals of the New York Academy of Sciences, Volume 600, Eds. Baserga and Denhardt (NYAS 1992); Milligan (1993) J. Med. Chem. 36:1923-1937; Antisense Research and Applications (1993, CRC Press).

[0068] An “isolated” polynucleotide as used herein for all of the aspects and embodiments of the invention is one which is free of sequences which naturally flank the polynucleotide in the genomic DNA of the organism from which the nucleic acid is derived, except as specifically described herein. Preferably, an “isolated” polynucleotide is substantially free of other cellular material, gel materials, vector linker sequences, and culture medium when produced by recombinant techniques, or substantially free of chemical precursors or other chemicals when chemically synthesized. The polynucleotides of the invention may be isolated from a variety of sources, such as by PCR amplification from genomic DNA, mRNA, or cDNA libraries derived from mRNA, using standard techniques; or they may be synthesized in vitro, by methods well known to those of skill in the art, as discussed in U.S. Pat. No. 6,664,057 and references disclosed therein. Synthetic polynucleotides can be prepared by a variety of solution or solid phase methods. Detailed descriptions of the procedures for solid phase synthesis of polynucleotide by phosphite-triester, phosphotriester, and H-phosphonate chemistries are widely available. (See, for example, U.S. Pat. No. 6,664,057 and references disclosed therein). Methods to purify polynucleotides include native acrylamide gel electrophoresis, and anion-exchange HPLC, as described in Pearson (1983) J. Chrom. 255:137-149. The sequence of the synthetic polynucleotides can be verified using standard methods.

[0069] As used herein with respect to all aspects and embodiments of the invention, a “probe set” refers to a group of one or more polynucleotides that each selectively hybridize to the same target (for example, a specific genomic region or mRNA) that can be used, for example, in breast cancer classification. Thus, a single “probe set” may comprise any number of different isolated polynucleotides that selectively hybridize to a given target. For example, a probe set that selectively hybridizes to SEQ ID NO: 10 may comprise one or more probes for a single 100 nucleotide segment of SEQ ID NO:10 and also a different 100 nucleotide segment of SEQ ID NO: 10, or both these in addition to a separate 10 nucleotide segment of SEQ ID NO: 10, or 500 different 10 nucleotide segments of SEQ ID NO: 10 (such as, for example, fragmenting a larger probe into many individual short polynucleotides). Those of skill in the art will understand that many such permutations are possible.

[0070] In this first aspect, the breast cancer biomarker can be any breast cancer biomarker that comprises or consists of between 2 and 35 probe sets as defined herein, wherein at least 40% of the probe sets comprise or consist of one or more isolated polynucleotides that selectively hybridize to one of the recited genomic regions. Such breast cancer biomarkers thus can contain other probe sets for use in breast cancer classification, diagnosis, or analysis, so long as at least 40% of the probe sets comprise one or more isolated polynucleotides that selectively hybridize to one of the recited genomic regions, and so long as no more than 35 probe sets are present in the breast cancer biomarker.

[0071] In preferred embodiments of the first aspect of the invention, at least 45%, 50%, 55%, 60%, 65%, 70%, 80%, 85%, 90%, 95%, or 100% of the probe sets comprise or consist of one or more isolated polynucleotides that selectively hybridize to one of the recited genomic regions. As will be apparent to those of skill in the art, as the percentage of probe sets that comprise or consist of one or more isolated polynucleotides that selectively hybridize to one of the recited genomic regions increases, the maximum number of probe sets in the breast cancer biomarker will decrease accordingly. Thus, for example, where at least 80% of the probe sets comprise or consist of one or more isolated polynucleotides that selectively hybridize to one of the recited genomic regions, the breast cancer biomarker will consist of between 2 and 17 probe sets. Those of skill in the art will recognize the various other permutations encompassed by the compositions according to the various aspects of the invention.

[0072] In a further preferred embodiment of the first aspect of the invention, the breast cancer biomarker comprises or consists of between 2 and 35 different probe sets, wherein the different probe sets in total selectively hybridize at least the following genomic regions: 20q13.2 (includes CYP24) and 3p23 (includes PDCD6IP). This embodiment (“HR+ composition 1”) is demonstrated herein to be particularly effective for classifying hormone receptor positive breast tumors, where “hormone receptor positive” is defined throughout the application as positive for either or both of estrogen receptors and progesterone receptors. In this embodiment, it is further preferred that the isolated polynucleotides in total selectively hybridize to a region of 17q25.3 (includes BIRC5). In various further preferred embodiments of HR+ composition 1, at least 45%, 50%, 55%, 60%, 65%, 70%, 80%, 85%, 90%, 95%, or 100% of the probe sets comprise or consist of one or more isolated polynucleotides that selectively hybridize to one of these 2 or 3 recited genomic regions.

[0073] In a further preferred embodiment of the first aspect of the invention, the breast cancer biomarker comprises or consists of between 2 and 35 different probe sets, wherein the different probe sets in total selectively hybridize to at least the following genomic regions: 17q21.2 (includes SMARCE 1) and 17q21.1 (includes NR1D1). This embodiment (“HR− composition 1”) is demonstrated herein to be particularly effective for classifying hormone receptor negative breast tumors, where “hormone receptor negative” is defined throughout the application as negative for either or both of estrogen receptors and progesterone receptors. In this embodiment, it is further preferred that the polynucleotides in total selectively hybridize to the region of 17q25.3 (includes BIRC5). In these various HR− composition 1 embodiments, it is further preferred that at least 45%, 50%, 55%, 60%, 65%, 70%, 80%, 85%, 90%, 95%, or 100% of the probe sets comprise or consist of one or more isolated polynucleotides that selectively hybridize to one of these 2 or 3 recited genomic regions.

[0074] The composition of each aspect and embodiment of the invention may further comprise other polynucleotide components that are beneficial for use in combination with the breast cancer biomarker, such as competitor nucleic acids and other control sequences (such as sequences to provide a standard of hybridization for comparison, etc.) Such other polynucleotide components are not probe sets for purposes of the compositions and methods of the invention. The compositions may optionally comprise other components, including but not limited to buffer solutions, hybridization solutions, detectable labels, and reagents for storing the nucleic acid compositions.

[0075] As used herein with respect to each aspect and embodiment of the invention, the term “selectively hybridizes” means that the isolated polynucleotides bind to target genomic region or other target to form a hybridization complex, and minimally or not at all to other sequences. The specific hybridization conditions used will depend on the length of the polynucleotide probes employed, their GC content, as well as various other factors as is well known to those of skill in the art. (See, for example, Tijssen (1993) Laboratory Techniques in Biochemistry and Molecular Biology—Hybridization with Nucleic Acid Probes part I, chapt 2, “Overview of principles of hybridization and the strategy of nucleic acid probe assays,” Elsevier, N.Y. (“Tijssen”)). In one embodiment, stringent hybridization and wash conditions are selected to be about 5° C. lower than the thermal melting point (Tm) for the specific polynucleotide at a defined ionic strength and pH. The Tm is the temperature (under defined ionic strength and pH) at which 50% of the target sequence hybridizes to a perfectly matched probe. High stringency conditions are selected to be equal to the Tm for a particular polynucleotide probe. An example of stringent conditions are those that permit selective hybridization of the isolated polynucleotides to the genomic or other target nucleic acid to form hybridization complexes in 0.2×SSC at 65° C. for a desired period of time, and wash conditions of 0.2×SSC at 65° C. for 15 minutes. It is understood that these conditions may be duplicated using a variety of buffers and temperatures. SSC (see, e.g., Sambrook, Fritsch, and Maniatis, in: Molecular Cloning, A Laboratory Manual, Cold Spring Harbor Laboratory Press, 1989) is well known to those of skill in the art, as are other suitable hybridization buffers.

[0076] In various preferred embodiments of this first aspect of the invention, the breast cancer biomarker includes three, four, five, six, seven, eight, nine, ten, eleven, twelve, thirteen, or fourteen different probe sets that comprise or consist of one or more isolated polynucleotides that selectively hybridize to a genomic region selected from the group consisting of 3p23, 8q21.13, 8q22.1, 8q22.2, 8q24.11, 10q22.3, 16q24.3, 17q11.2, 17q12, 17q21.1, 17q22.2, 17q25.3, 19q13.12, and 20q13.2, wherein the different probe sets in total selectively hybridize to at least three, four, five, six, seven, eight, nine, ten, eleven, twelve, thirteen, or fourteen of the recited genomic regions. In each of these embodiments, it is further preferred that at least 45%, 50%, 55%, 60%, 65%, 70%, 80%, 85%, 90%, 95%, or 100% of the probe sets for a given breast cancer biomarker comprise or consist of one or more isolated polynucleotides that selectively hybridize to one of the recited genomic regions.

[0077] In each of the aspects and embodiments of the compositions and methods of the present invention, it is further preferred that the isolated polynucleotides are labeled with a detectable label. In a preferred embodiment, the detectable labels on the isolated polynucleotides in one probe set are all the same, and are distinguishable from the detectable labels on the isolated polynucleotides in the other probe sets in a given breast cancer biomarker. Such labeling of the isolated polynucleotides facilitates differential determination of the signals from different probe sets in a given breast cancer biomarker. Useful detectable labels include but are not limited to radioactive labels such as ³²p, ³H, and ¹⁴C; fluorescent dyes such as fluorescein isothiocyanate (FITC), rhodamine, lanthanide phosphors, Texas red, and ALEXIS™ (Invitrogen), CY™ dyes (Amersham); (Spectrum Dyes, Abbott Labs), electron-dense reagents such as gold; enzymes such as horseradish peroxidase, beta-galactosidase, luciferase, and alkaline phosphatase; colorimetric labels such as colloidal gold; magnetic labels such as those sold under the mark DYNABEADS™; biotin; dioxigenin; or haptens and proteins for which antisera or monoclonal antibodies are available. The label can be directly incorporated into the polynucleotide, or it can be attached to a molecule which hybridizes or binds to the polynucleotide. The labels may be coupled to the isolated polynucleotides by any means known to those of skill in the art. In a various embodiments, the isolated polynucleotides are labeled using nick translation, PCR, or random primer extension (see, e.g., Sambrook et al. supra). Methods for detecting the label include, but are not limited to spectroscopic, photochemical, biochemical, immunochemical, physical and chemical techniques.

[0078] Those of skill in the art are aware that multiple resources are available to identify specific nucleotide sequences associated with the genomic regions discussed above. In one example, such sequences can be found as follows:
[0079] Go to the UCSC web site, http://genome.ucsc.edu/index.html?org-Human. At this site, select the Genome Browser on the menu at the left. Then in the “position” field enter, (in this format, e.g. for chromosome 16p13): 16:11,000,000-12,000,000 and then select “jump” (position entries have to be either by gene name, clone name, accession number, etc. or base pair position, usually in millions) Once the image of the chromosome is in view, which has the base pairs at the top of the image, and the chromosome bands immediately below, the navigation tools can be used to zoom in or out, move to the left or right as necessary. To get to the sequence itself (for 16p 13, as an example), select the band designation within the image, which leads to the “Chromosome Bands Localized by FISH Mapping Clones (p113.2)” page, which has the “View DNA for this feature” button. Choose the “View DNA . . . ” button which leads to the “Get DNA in Window”. At the bottom of that page choose the “Get DNA” button, and the sequence appears. At the very top of the sequence page the exact base pairs are shown.

[0080] Those of skill in the art will understand how to apply the present disclosure to identify the nucleotide sequences of other genomic regions of interest disclosed herein.

[0081] In a second aspect, the invention provides compositions comprising a breast cancer biomarker comprising or consisting of between 2 and 42 different probe sets, wherein at least 40% of the different probe sets comprise or consist of one or more isolated polynucleotides that selectively hybridize to an isolated nucleic acid according to formula 1:
X1-X2-X3;
[0082] wherein X2 is a human genomic insert contained within a bacterial artificial chromosome (“BAC”), and is selected from the group consisting of SEQ ID NOS: 18-65 (see Table 1) or their complement, wherein X1 and X3 are independently 0-500 kB of human genomic nucleic acid flanking X2 in the human genome; and
[0083] wherein the different polynucleotide probe sets in total selectively hybridize to at least two non-overlapping nucleic acids according to formula 1.

[0084] BAC sequence information is provided below in Table 2 (and as provided in Table 1), as well as the figures noted in Table 2.

TABLE 2

| | | |
|---|---|---|
| (a) | AL080059: | RP11-499K24 |
| (b) | STK3: | RP11-159A16 |
| | | RP11-765K18 |
| | | RP11-563E23 |
| | | RP11-613I24 |
| | | RP11-44N12 |
| (c) | EXT1: | RP11-486B24 |
| | | RP11-96F23 |
| | | RP11-24C23 |
| | | RP11-601K03 |
| | | RP11-742D20 |
| | | RP11-453O16 |
| | | RP11-208A09 |
| | | RP11-346L16 |
| (d) | RAD21: | RP11-367C15 |
| (e) | ANXA11: | RP11-529C24 |
| | | RP11-668E21 |
| (f) | MLN64: | RP11-689B15 |
| | (STARD3) | RP11-62N23 |
| | | RP11-94L15 |
| (g) | CYP24A1: | RP11-92B18 |
| | | RP11-310L22 |
| | | RP11-234K07 |
| | | RP11-114N21 |
| (h) | IMPA1: | RP11-67F19 |
| | | RP11-34M16 |
| (i) | GRB7: | RP11-563O04 |
| | | RP11-94L15 |
| | | RP11-610O22 |
| (j) | PDCD6IP: | RP11-683H06 |
| | | RP11-795G20 |
| | | RP11-637B24 |
| (k) | BIRC5: | RP11-141D15 |
| | | RP11-219G17 |
| | | RP13-586J16 |
| (l) | SMARCE1: | RP11-372J02 |
| (m) | ZNF144: | RP11-610D13 |
| | | RP11-607B02 |
| | | RP11-15P20 |
| (n) | FANCA: | RP11-354M24 |
| | | RP11-364G13 |
| (o) | Hepsin: | RP11-737K14 |
| | | RP11-233I16 |
| (p) | NR1D1: | RP11-278E15 |
| | | RP11-735P18 |
| | | RP11-749I16 |
| (q) | ZNF207: | RP11-299H03; and |
| | | RP11-634A23. |

[0085] The nucleic acids disclosed above in the “X2” group are the human genomic sequences encompassing the marker genes (and portions of the genomic regions of the first aspect of the invention) discussed above, cloned into BAC vectors. (See Table 1) As will be apparent to those of skill in the art in reviewing Table 1, genomic regions for each of the cloned markers for breast cancer classification described above (SEQ ID NO:1-17) are present in the BAC inserts listed within the “X2” groups above. For some of the 17 cloned markers, multiple overlapping BAC insert sequences are provided (see Tables 1 and 2).

[0086] According to this second aspect of the invention, the different polynucleotide probe sets in total selectively hybridize to at least two non-overlapping nucleic acids according to Formula 1 (ie: at least two of (a)-(q) in Table 2).

[0087] In various preferred embodiments of this second aspect of the invention, the breast cancer biomarker comprises or consists of three, four, five, six, seven, eight, nine, ten, eleven, twelve, thirteen, fourteen, fifteen, sixteen, or seventeen different probe sets that selectively hybridize to an isolated nucleic acid sequence according to formula 1, or its complement. In each of these embodiments, it is further preferred that at least 45%, 50%, 55%, 60%, 65%, 70%, 80%, 85%, 90%, 95%, or 100% of the probe sets for a given breast cancer biomarker comprise or consist of one or more isolated polynucleotides that selectively hybridize to a nucleic acid according to formula 1, or its complement, wherein the different polynucleotide probe sets in total selectively hybridize to at least three, four, five, six, seven, eight, nine, ten, eleven, twelve, thirteen, fourteen, fifteen, sixteen, or seventeen non-overlapping nucleic acids according to formula 1.

[0088] As will be apparent to those of skill in the art, as the percentage of probe sets that comprise or consist of one or more isolated polynucleotides that selectively hybridize to a nucleic acid according to formula 1, or its complement, the maximum number of probe sets in the breast cancer biomarker will decrease accordingly. Thus, for example, where at least 80% of the probe sets comprise or consist of one or more isolated polynucleotides that selectively hybridize to a nucleic acid according to formula 1, or its complement, the breast cancer marker will consist of between 2 and 21 probe sets. Those of skill in the art will recognize the various other permutations encompassed by the compositions according to the various embodiments of the second aspect of the invention.

[0089] In a further preferred embodiment of the second aspect of the invention, the different probe sets comprise or consist of one or more isolated polynucleotides that in total selectively hybridize to at least two different nucleic acids according to Formula I having X2 groups as follows:
[0090] a) one or more of SEQ ID NO:62-65 (includes CYP24), or complements thereof; and
[0091] b) one or more of SEQ ID NO:44-46 (includes PDCD6IP), or complements thereof.

[0092] This embodiment (“HR+ composition 2”) is demonstrated herein to be particularly effective for classifying hormone receptor positive breast tumors, where “hormone receptor positive” is defined as positive for either or both of estrogen receptors and progesterone receptors. In a further embodiment of the HR+ composition 2, the composition includes a probe set comprising or consisting of isolated polynucleotides that selectively hybridize to SEQ ID NO:41-43 (includes BIRC5), or complements thereof.

[0093] In various further preferred embodiments of HR+ composition 2, the different probe sets comprise or consist of one or more isolated polynucleotides that in total selectively hybridize to one or more nucleic acid from each of the following groups:
[0094] (a) SEQ ID NOS: 256-327 (unique sequence probes from the CYP24 containing BAC), or complements thereof; and
[0095] (b) SEQ ID NOS: 160-255 (unique sequence probes from the PDCD6IP containing BAC), or complements thereof.

[0096] Nucleic acids in group (a) are unique sequence regions from the BAC including CYP24, and nucleic acids in group (b) are unique sequence regions from the BAC including PDCD6IP. Thus, this embodiment of HR+ composition 2 provides unique sequence probes for use if the methods of the invention, which obviates the need for competitor DNA in hybridization assays. In a further embodiment, the unique sequence probes for HR+ composition includes a probe set comprising or consisting of isolated polynucleotides that selectively hybridize to one or more nucleic acid from the groups:
[0097] (c) SEQ ID NOS:416-511 (unique sequence probes from the BIRC5 containing BAC), or complements thereof.

[0098] In these various embodiments of HR+ composition 2, it is further preferred that at least 45%, 50%, 55%, 60%, 65%, 70%, 80%, 85%, 90%, 95%, or 100% of the probe sets comprise or consist of one or more isolated polynucleotides that selectively hybridize to one of the 2 or 3 recited nucleic acids.

[0099] In a further preferred embodiment of the second aspect of the invention, the different probe sets comprise or consist of one or more isolated polynucleotides that in total selectively hybridize to at least two different nucleic acids according to Formula I having X2 groups as follows:
[0100] (a) one or more of SEQ ID NO:57-59 (includes NR1D1), or complements thereof; and
[0101] (b) SEQ ID NO:40 (includes SMARCE1), or complements thereof.

[0102] This embodiment (“HR− composition 2”) is demonstrated herein to be particularly effective for classifying hormone receptor negative breast tumors, where “hormone receptor negative” is defined as negative for either or both of estrogen receptors and progesterone receptors. In a further embodiment of the HR− composition 2, the composition includes a probe set comprising or consisting of isolated polynucleotides that selectively hybridize to one or more of SEQ ID NO:41-43 (includes BIRC5), or complements thereof.

[0103] In various further preferred embodiments of HR− composition 2, the different probe sets in total selectively hybridize to one or more nucleic acid from each of the following groups:
[0104] (a) SEQ ID NOS:328-415 (unique sequence probes from the NR1D1-containing BAC), or complements thereof; and
[0105] (b) SEQ ID NOS:66-159 (unique sequence probes from the SMARCE-containing BAC), or complements thereof.

[0106] Nucleic acids in group (a) are unique sequence regions from the BAC including (NR1D1, and nucleic acids in group (b) are unique sequence regions from the BAC including SMARCE 1. Thus, this embodiment of HR+ composition 2 provides unique sequence probes for use if the methods of the invention, which obviates the need for competitor DNA in hybridization assays. In a further embodiment, the unique sequence probes for HR− composition 2 the different probe sets in total selectively hybridize to one or more of: (c) SEQ ID NOS:416-511 (unique sequence probes from the BIRC5-containing BAC), or complements thereof.

[0107] In these embodiments of HR− composition 2, it is further preferred that at least 45%, 50%, 55%, 60%, 65%, 70%, 80%, 85%, 90%, 95%, or 100% of the probe sets comprise or consist of one or more isolated polynucleotides that selectively hybridize to one of these 3 recited nucleic acids.

[0108] In a further preferred embodiment of each of the above embodiments of the second aspect of the invention, X1 and X3 are 0-400 kb; 0-300 kb; 0-200 kb. 0-100 kb; or 0 kb.

[0109] In a preferred embodiment of the various embodiments of the second aspect of the invention, the different probe sets of a breast cancer biomarker comprise or consist of one or more polynucleotides of at least 10 nucleotides of a nucleic acid according to formula 1, or complements thereof. In a further preferred embodiment, the different probe sets of a breast cancer biomarker comprise or consist of one or more polynucleotide of at least 10 nucleotides of a nucleic acid selected from the group consisting of SEQ ID NO:18 to SEQ ID NO: 511, or complements thereof.

[0110] In various further preferred embodiments of each of the embodiments of the first and second aspects of the invention, and related aspects and embodiments described below, the polynucleotides in the probe sets independently comprise or consist of at least 10, 15, 20, 25, 30, 35, 40, 45, 50, 55, 60, 65, 70, 75, 80, 85, 90, 95, 100, 150, 200, 250, 300, 350, 400, 450, 500, 550, 600, 650, 700, 750, 800, 850, 900, 950, 1000, 1100, 1200, 1300, 1400, 1500, 1600, 1700, 1800, 1900, 2000, 2100, 2200, 2300, 2400, 2500, 2600, 2700, 2800, 2900, 3000, 3100, 3200, 3300, 3400, 3500, 3600, 3700, 3800, 3900, 4000, 4100, 4200, 4300, 4400, 4500, 4600, 4700, 4800, 4900, 5000, 5100, 5200, 5300, 5400, 5500, 5600, 5700, 5800, 5900, 6000, 6100, 6200, 6300, 6400, 6500, 6600, 6700, 6800, 6900, 7000, 7100, 7200, 7300, 7400, 7500, 7600, 7700, 7800, 7900, 8000, 8100, 8200, 8300, 8400, 8500, 8600, 8700, 8800, 8900, 9000, 9100, 9200, 9300, 9400, 9500, 9600, 9700, 9800, 9900, 10,000; 15,000; 20,000; 25,000; 30,000; 35,000; 40,0000; 45,000; 50,000; 60,000; 70,000; 80,000; 90,000; 100,000; 110,000; 120,000; 130,000; 140,000; 150,000; 160,000; 170,000; 180,000; 190,000; 200,000; 210,000; or 220,000 nucleotides of the relevant sequence, or complements thereof.

[0111] The BACS disclosed herein are as defined on the University of California at Santa Cruz (UCSC) Genome Browser on Human April 2003 Freeze and are available from the Children's Hospital Oakland Research Institute at www.bacpac.chori.org. The human genomic inserts cloned into the BACS disclosed herein range in size from approximately 150 kB to 220 in length.

[0112] As of March of 2004, detailed information on the BACS is available by going to the web site for the Children's Hospital Oakland Research Institute at www.bacpac.chori.org and clicking on the link to “Human ‘32K’ BAC Re-array” under the products menu. From this page, www.bcgsc.ca/lab/mapping/bacrearray/human/ provides a link to the Genome Sciences Centre web page. From this page, go to the Annotations box and find the further box for “Browse clone set”. Within that box is a link to the UCSC Genome Browser; click on the link that says “available,” which takes you to http://genome.ucsc.edu/cgi-bin/hgTracks, where detailed BAC information, such as that provided in the accompanying figures, can be found. The BACS can be found by searching by BAC name or by gene name. The sequence of the human genomic insert cloned in a BAC of interest can be found at http://genome.ucsc.edu/cgi-bin/hgTracks. Once the BAC of interest has been found in the database, as described above, the sequence of each BAC be found by “clicking” on the name of the BAC. The first click connects to a “Custom Track” for that BAC. On the Custom Track page there is an option called “View DNA for this feature”, which is a link to the “Get DNA” window, for that specific BAC. On the “Get DNA” page, the “Get DNA” button retrieves the complete DNA sequence for that BAC clone. Furthermore, sequences flanking the BAC of interest can also be retrieved from the “Get DNA” page by using “Sequence Retrieval Option”: the number of bases desired both upstream and downstream of the BAC are entered and, and those flanking sequences are then retrieved along with the sequence of the BAC itself. Furthermore, the detailed information on the BACS provided herein discloses the genomic location in terms of base pair position of the human genomic insert cloned in BACS as of the Human April 2003 Freeze.

[0113] As will be understood by those of skill in the art, the human genome sequence is frequently updated, with the updates made available to the public. Those of skill in the art will thus be able to identify the sequences flanking the human genomic insert cloned in a BAC of interest disclosed herein by accessing the human genome information (for example, at http://genome.ucsc.edu/). Therefore, the “flanking sequences” as recited herein refer to flanking sequences as disclosed on the web sites provided above, as well as updates thereto. For example, one can go to the UCSC Genome Browser site as disclosed above and review the BAC information as of the Human April 2003 Freeze to get the relative base pair position on the chromosome that the human genomic insert cloned in a BAC of interest was derived from. By reviewing the human genome sequence data available at as of the Human April 2003 Freeze (as described above), one of skill in the art can obtain the nucleic acid sequences flanking the human genomic insert cloned in a BAC of interest disclosed herein. Those of skill in the art can further use this sequence to identify sequences flanking the human genomic insert cloned in a BAC of interest from this same site as currently updated in the human genome sequence, or from other similar sites that provide human genome sequence information.

[0114] In a third aspect, the present invention provides compositions comprising a breast cancer biomarker comprising or consisting of between 2 and 42 different probe sets, wherein at least 40% of the different probe sets comprise or consist of one or more isolated polynucleotides that selectively hybridize to a nucleic acid according to one of SEQ ID NO:1-17 or complements thereof; wherein the different probe sets in total selectively hybridize to at least two of the recited nucleic acids according to SEQ ID NO:1-17 or complements thereof.

[0115] In various preferred embodiments of the third aspect of the invention, the composition comprises a breast cancer biomarker comprising or consisting of three, four, five, six, seven, eight, nine, ten, eleven, twelve, thirteen, fourteen, fifteen, sixteen, or seventeen different probe sets that comprise of consist of one or more isolated polynucleotides that selectively hybridize to a nucleic acid according to one of SEQ ID NO:1-17 or complements thereof, wherein different probe sets in total selectively hybridize to at least three, four, five, six, seven, eight, nine, ten, eleven, twelve, thirteen, fourteen, fifteen, sixteen, or seventeen of the recited nucleic acids according to SEQ ID NO:1-17 or complements thereof. In each of these embodiments, it is further preferred that at least 45%, 50%, 55%, 60%, 65%, 70%, 80%, 85%, 90%, 95%, or 100% of the probe sets for a given breast cancer biomarker comprise or consist of one or more isolated polynucleotides that selectively hybridize to a nucleic acid according to SEQ ID NO:1-17, or complements thereof. As will be apparent to those of skill in the art, as the percentage of probe sets that comprise or consist of one or more isolated polynucleotides that selectively hybridize to a nucleic acid according to SEQ ID NO:1-17, or complements thereof, the maximum number of probe sets in the breast cancer biomarker will decrease accordingly. Thus, for example, where at least 80% of the probe sets comprise or consist of one or more isolated polynucleotides that selectively hybridize to a nucleic acid according to SEQ ID NO:1-17, or complements thereof, the breast cancer biomarker will consist of between 2 and 21 probe sets. Those of skill in the art will recognize the various other permutations encompassed by the compositions according to the various embodiments of the third aspect of the invention.

[0116] In a preferred embodiment of the various embodiments of the third aspect of the invention, the different probe sets of a breast cancer biomarker comprise or consist of one or more polynucleotides of at least 10 nucleotides of a nucleic acid according to SEQ ID NO:1-17, or complements thereof.

[0117] In a further preferred embodiment of the third aspect of the invention, the different probe sets comprise or consist of isolated polynucleotides that in total selectively hybridize to at least SEQ ID NO:17 (CYP24), and SEQ ID NO:10 (PDCD6IP), or complements thereof. This embodiment (“HR+ composition 3”) is demonstrated herein to be particularly effective for classifying hormone receptor positive breast tumors, where “hormone receptor positive” is defined as positive for either or both of estrogen receptors and progesterone receptors. In this embodiments of HR+composition 3, it is further preferred that the composition includes a probe set comprising or consisting of isolated polynucleotides that selectively hybridize to SEQ ID NO:9 (BIRC5), or complements thereof. In these various embodiments of HR+ composition 3, it is further preferred that at least 45%, 50%, 55%, 60%, 65%, 70%, 80%, 85%, 90%, 95%, or 100% of the probe sets comprise or consist of one or more isolated polynucleotides that selectively hybridize to one of these 2 or 3 recited nucleic acids, or complements thereof.

[0118] In a further preferred embodiment of the third aspect of the invention, the different probe sets in total selectively hybridize to at least SEQ ID NO:15 (NR1D1 and SEQ ID NO:8 (SMARCE 1), or complements threof. This embodiment (“HR-composition 3”) is demonstrated herein to be particularly effective for classifying hormone receptor negative breast tumors, where “hormone receptor negative” is defined as negative for either or both of estrogen receptors and progesterone receptors. In this embodiment of HR− composition 3, it is further preferred that the composition includes a probe set comprising or consisting of isolated polynucleotides that selectively hybridize to SEQ ID NO:9 (BIRC5), or complements thereof. In these various preferred embodiments of HR− composition 3, it is further preferred that the different probe sets in total selectively hybridize to at least 45%, 50%, 55%, 60%, 65%, 70%, 80%, 85%, 90%, 95%, or 100% of the probe sets comprise or consist of one or more isolated polynucleotides that selectively hybridize to one of these 3 recited nucleic.

[0119] The compositions of this third aspect of the invention are especially preferred for use in RNA expression analysis from the genes in a tissue of interest, such as breast tissue samples (including but not limited to biopsies, lumpectomy samples, and solid tumor samples), fibroids, circulating tumor cells that have been shed from a tumor, blood samples (such as blood smears), and bone marrow cells. Such polynucleotides according to this aspect of the invention can be of any length that permits selective hybridization to the nucleic acid of interest. In various preferred embodiments of the third aspect of the invention and related aspects and embodiments disclosed below, the isolated polynucleotides comprise or consist of at least 10, 15, 20, 25, 30, 35, 40, 45, 50, 55, 60, 65, 70, 75, 80, 85, 90, 95, 100, 150, 200, 250, 300, 350, 400, 450, 500, 550, 600, 650, 700, 750, 800, 850, 900, 950, or 1000 nucleotides according to a nucleic acid selected from the group consisting of SEQ ID NO:1-17, or complements thereof. In further embodiments, an isolated polynucleotide according to this third aspect of the invention comprise or consist of a nucleic acid according to one of SEQ ID NO:1-17, or complements thereof.

[0120] The compositions of the various aspects and embodiments of the invention can be in lyophilized form, or preferably comprise a solution containing the isolated polynucleotides, including but not limited to buffer solutions, hybridization solutions, and solutions for keeping the compositions in storage. Such a solution can be made as such, or the composition can be prepared at the time of hybridizing the polynucleotides to a target sequence, as discussed below.

[0121] Alternatively, the compositions can be placed on a solid support, such as in a microarray, bead, or microplate format. The term “microarray” as used herein refers to a plurality of probe sets immobilized on a solid surface to which sample nucleic acids are hybridized (such as breast cancer mRNA or derived cDNA).

[0122] Thus, in a fourth aspect, the present invention provides microarrays comprising a support structure on which are arrayed one or more probe sets according to the compositions of the invention, as disclosed above. In this aspect, a single probe set can be present at a single location on the array, or different polynucleotides from a single probe set can be present at different and defined locations on the array.

[0123] In this aspect, the polynucleotides are immobilized on a microarray solid surface. Other nucleic acids, such as reference or control nucleic acids, can be optionally immobilized on the solid surface as well. Methods for immobilizing nucleic acids on a variety of solid surfaces are well known to those of skill in the art. A wide variety of materials can be used for the solid surface. Examples of such solid surface materials include, but are not limited to, nitrocellulose, nylon, glass, quartz, diazotized membranes (paper or nylon), silicones, polyformaldehyde, cellulose, cellulose acetate, paper, ceramics, metals, metalloids, semiconductive materials, coated beads, magnetic particles; plastics such as polyethylene, polypropylene, and polystyrene; and gel-forming materials, such as proteins (e.g., gelatins), lipopolysaccharides, silicates, agarose and polyacrylamides.

[0124] A variety of different materials may be used to prepare the microarray solid surface to obtain various properties. For example, proteins (e.g., bovine serum albumin) or mixtures of macromolecules (e.g., Denhardt's solution) can be used to minimize non-specific binding, simplify covalent conjugation, and/or enhance signal detection. If covalent bonding between a compound and the surface is desired, the surface will usually be functionalized or capable of being functionalized. Functional groups which may be present on the surface and used for linking include, but are not limited to, carboxylic acids, aldehydes, amino groups, cyano groups, ethylenic groups, hydroxyl groups, and mercapto groups. Methods for linking a wide variety of compounds to various solid surfaces are well known to those of skill in the art.

[0125] In a preferred embodiment of this fourth aspect, the locations on the array containing probe sets of the present invention range in size between 1 μm and 1 cm in diameter, more preferably between 1 μm and 5 mm in diameter, and even more preferably between 5 μm and 1 mm in diameter. The polynucleotides of the probe sets may be arranged on the solid surface at different densities, depending on factors such as the nature of the label, the solid support, and the size of the polynucleotide. One of skill will recognize that each location on the microarray may comprise a mixture of polynucleotides of different lengths and sequences from a given probe set. The length and complexity of the polynucleotides fixed onto the locations can be adjusted to provide optimum hybridization and signal production for a given hybridization procedure, and to provide the required resolution.

[0126] In a fifth aspect, the present invention provides methods for classifying a breast tumor, comprising
[0127] (a) contacting a nucleic acid sample obtained from a subject having a breast tumor with polynucleotide probes that, in total, selectively hybridize to two or more genomic regions selected from the group consisting of 3p23, 8q21.13, 8q22.1, 8q22.2, 8q24.11, 10q22.3, 16q24.3, 17q11.2, 17q12, 17q21.1, 17q22.2, 17q25.3, 19q13.12, and 20q13.2; wherein the contacting occurs under conditions to promote selective hybridization of the polynucleotides of the probe set to the two or more genomic regions;
[0128] (b) detecting formation of hybridization complexes;
[0129] (c) determining whether one or more of the genomic regions are present in an altered copy number in the nucleic acid sample; and
[0130] (d) correlating an altered copy number of one or more of the genomic regions with a breast cancer classification.

[0131] The nucleic acid sample used in the methods of the present invention can be from any source useful in classifying a breast tumor, including but not limited to breast tissue samples (including but not limited to biopsies, lumpectomy samples, and solid tumor samples), fibroids, circulating tumor cells that have been shed from a tumor, blood samples (such as blood smears), and bone marrow cells. The nucleic acid sample is preferably a cellular DNA sample. In a preferred embodiment, the nucleic acid sample is a human nucleic acid sample.

[0132] In the fifth aspect of the invention the methods are used to detect genomic amplifications or deletions associated with breast cancer. As used herein “associated with breast cancer” means that an altered copy number of one or more of these genomic regions can be used to classify a feature of the breast tumor or the prognosis of a patient from whom the nucleic acid sample was taken, including the following:
[0133] (a) Diagnosis of breast cancer (benign vs. malignant tumor);
[0134] (b) Metastatic potential, potential to metastasize to specific organs, or course of the tumor;
[0135] (c) Stage of the tumor;
[0136] (d) Patient prognosis in the absence of chemotherapy or hormonal therapy;
[0137] (e) Prognosis of patient response to treatment (chemotherapy, radiation therapy, and/or surgery to excise tumor)
[0138] (f) Predicted optimal course of treatment for the patient;
[0139] (g) Prognosis for patient relapse after treatment; and
[0140] (h) Patient life expectancy.

[0141] Thus, the methods of this aspect of the invention provide information on, for example, breast cancer diagnosis, and patient prognosis in the presence or absence of chemotherapy, a predicted optimal course for treatment of the patient, and patient life expectancy. In a preferred embodiment, the breast cancer classification comprises a prognosis of the recurrence of the breast tumor. In a further preferred embodiment, an alteration (ie: increase or decrease) in the copy number of the one or more genomic regions is correlated with an increased risk of recurrence of the breast tumor. In a further preferred embodiment, alterations in the normal expression levels of the one or more nucleic acid targets is correlated with a higher risk of recurrence of the breast tumor.

[0142] As used herein for all aspects and embodiments of the methods, an “alteration in copy number means any increase or decrease in copy number of the genomic region or target relative to the copy number in a normal diploid human genome. It is understand that for most expressed genes in the human genome this normal number will be two.

[0143] One skilled in the art will further understand that “alteration in the expression levels” (as discussed below) means any deviation from the level of expression relative to the same normal healthy tissue. It is further understood that “increased risk” means to be at a higher risk relative to all others having similar or identical clinical and/or pathological characteristics, in the absence of the information obtained using the markers as described herein. As used herein, “recurrence” means tumor local recurrence (including ipsilateral, local, or contralateral), metastasis, or death from breast cancer.

[0144] In a preferred embodiment, the determining in step (c) comprises determining whether 2, 3, 4, 5, 6, 7, 8, 9, 10, 11, 12, 13, or 14 of the recited genomic regions are present in an altered copy number, wherein such altered copy number correlates with a particular breast cancer classification, preferably a classification that the breast cancer is likely to recur.

[0145] Thus, the invention further provides methods for making a treatment decision for a breast cancer patient, comprising carrying out the methods for classifying a breast tumor according to the different aspects and embodiments of the present invention, and then weighing the results in light of other known clinical and pathological risk factors, in determining a course of treatment for the breast cancer patient.

[0146] For example, a patient that is shown by the methods of the invention to have an increased risk of recurrence could be treated more aggressively with standard therapies, such as chemotherapy, radiation therapy, and/or mastectomy, or novel or experimental therapies under clinical investigation.

[0147] In various preferred embodiments of the methods of the fifth aspect of the invention, the polynucleotide probes comprise compositions selected from the various aspects and embodiments of the compositions of the invention disclosed above. In a most preferred embodiment, the polynucleotides probes comprise a detectable label, as disclosed above, and in particular the different probe sets of the compositions of the invention comprise distinguishable detectable labels, to facilitate analysis of which genomic region(s) is/are the site of the an altered copy number.

[0148] In various other preferred embodiments of the methods of the invention, the compositions for use in the methods, in total, selectively hybridize to three, four, five, six, seven, eight, nine, ten, eleven, twelve, thirteen, or fourteen genomic regions selected from the group consisting of 3p23, 8q21.13, 8q22.1, 8q22.2, 8q24.11, 10q22.3, 16q24.3, 17q11.2, 17q12, 17q21.1, 17q22.2, 17q25.3, 19q13.12, and 20q13.2; wherein the contacting occurs under conditions to promote selective hybridization of the one or more probe sets to the three, four, five, six, seven, eight, nine, ten, eleven, twelve, thirteen, or fourteen genomic regions.

[0149] In various further preferred embodiments of the methods of this fifth aspect of the invention, the compositions comprise or consist of one or more of the HR+ and HR-compositions of the invention, and the methods are used to provide a classification of HR+ and/or HR− breast tumors. In a preferred embodiment, the classification comprises prognosing a recurrence of the HR+ or HR− breast tumors. Thus, in one preferred embodiment of the fifth aspect of the invention, the breast cancer biomarker comprises or consists of between 2 and 35 different probe sets, wherein the different probe sets comprise or consist of isolated polynucleotides that in total selectively hybridize to at least the following genomic regions: 20q13.2 (includes CYP24) and 3p23 (includes PDCD6IP). This embodiment (“HR+ composition 1”) is demonstrated herein to be particularly effective for classifying hormone receptor positive breast tumors, where “hormone receptor positive” is defined as positive for either or both of estrogen receptors and progesterone receptors. In this embodiment, it is further preferred that the HR+composition comprises isolated polynucleotides in total also selectively hybridize to genomic region 17q25.3 (includes BIRC5). In various further preferred embodiments of the HR+ composition, at least 45%, 50%, 55%, 60%, 65%, 70%, 80%, 85%, 90%, 95%, or 100% of the probe sets comprise or consist of one or more isolated polynucleotides that selectively hybridize to one of these 2 or 3 recited genomic regions.

[0150] In a further preferred embodiment of the fifth aspect of the invention, the polynucleotide probes comprise or consist of a breast cancer biomarker that comprises or consists of between 2 and 35 different probe sets, and wherein the different probe sets in total selectively hybridize to at least the following genomic regions: 17q21.2 (includes SMARCE 1) and 17q21.1 (includes NR1D1). This embodiment (“HR− composition 1”) is demonstrated herein to be particularly effective for classifying hormone receptor negative breast tumors, where “hormone receptor negative” is defined as negative for either or both of estrogen receptors and progesterone receptors. In this embodiment, it is further preferred that the polynucleotides in total selectively hybridize to genomic region 17q25.3 (includes BIRC5). In these various HR− composition embodiments, it is further preferred that at least 45%, 50%, 55%, 60%, 65%, 70%, 80%, 85%, 90%, 95%, or 100% of the probe sets comprise or consist of one or more isolated polynucleotides that selectively hybridize to one of these 2 or 3 recited genomic regions.

[0151] In various further embodiments of the methods of the invention, the compositions for use in the methods comprise a breast cancer biomarker comprising or consisting of between 2 and 42 different probe sets, wherein at least 40% of the different probe sets comprise one or more isolated polynucleotides that selectively hybridize to a nucleic acid according to formula 1, or complements thereof:
X1-X2-X3;
[0152] wherein X2 is a human genomic insert contained within a bacterial artificial chromosome (“BAC”) selected from the group consisting of SEQ ID NOS: 18-65 (see FIG. 1), wherein X1 and X3 are independently 0-500 kB of human genomic nucleic acids flanking X2 in the human genome; and
[0153] wherein the different polynucleotide probe sets in total selectively hybridize to at least two non-overlapping genomic sequences according to formula 1. Such biomarkers may preferably consist of three, four, five, six, seven, eight, nine, ten, eleven, twelve, thirteen, fourteen, fifteen, sixteen, or seventeen different probe sets that selectively hybridize to a nucleic acid sequence according to formula 1, or its complement. In each of these embodiments, it is further preferred that at least 45%, 50%, 55%, 60%, 65%, 70%, 80%, 85%, 90%, 95%, or 100% of the probe sets for a given breast cancer biomarker comprise or consist of one or more isolated polynucleotides that selectively hybridize to a nucleic acid sequence according to formula 1, or complements thereof, wherein the different polynucleotide probe sets in total selectively hybridize to at least three, four, five, six, seven, eight, nine, ten, eleven, twelve, thirteen, fourteen, fifteen, sixteen, or seventeen non-overlapping genomic sequences according to formula 1. It is further preferred that X1 and X3 are 0-400 kb; 0-300 kb; 0-200 kb; 0-100 kb; or 0 kb. It is further preferred that the different probe sets of a breast cancer biomarker comprise or consist of one or more polynucleotide sequences of at least 10 nucleotides of a nucleic acid according to formula 1, or complements thereof. In a further preferred embodiment, the different probe sets of a breast cancer biomarker comprise or consist of one or more polynucleotides of at least 10 nucleotides of a nucleic acid selected from the group consisting of SEQ ID NOS:18 to 511, or complements thereof.

[0154] In a further preferred embodiment of the methods of the invention, the different probe sets in total selectively hybridize to at least two different nucleic acids according to Formula I having X2 groups as follows:
[0155] a) one or more of SEQ ID NO:62-65 (includes CYP24), or complements thereof; and
[0156] b) one or more of SEQ ID NO:44-46 (includes PDCD6IP)), or complements thereof.

[0157] This embodiment (“HR+ composition 2”) is demonstrated herein to be particularly effective for classifying hormone receptor positive breast tumors, where “hormone receptor positive” is defined as positive for either or both of estrogen receptors and progesterone receptors. In a further embodiment of the HR+ composition 2, the different probe sets in total selectively hybridize to one or more of SEQ ID NO:41-43 (includes BIRC5). In various further preferred embodiments, the different probe sets in total selectively hybridize to one or more nucleic acid from each of the following groups:
[0158] (a) SEQ ID NOS: 256-327 (unique sequence probes from the CYP24-containing BAC)), or complements thereof; and
[0159] (b) SEQ ID NOS: 160-255 (unique sequence probes from the PDCD6IP-containing BAC)), or complements thereof.

[0160] Nucleic acids in group (a) are unique sequence regions from the BAC including CYP24, and nucleic acids in group (b) are unique sequence regions from the BAC including PDCD6IP. Thus, this embodiment of HR+ composition 2 provides unique sequence probes for use if the methods of the invention, which obviates the need for competitor DNA in hybridization assays. In a further embodiment, the unique sequence probes for HR+ composition 2 further include different probe sets that selectively hybridize to one or more nucleic acid from the groups:
[0161] (c) SEQ ID NOS:416-511 (unique sequence probes from the BIRC5-containing BAC)), or complements thereof.

[0162] In these various embodiments of HR+ composition 2, it is further preferred that at least 45%, 50%, 55%, 60%, 65%, 70%, 80%, 85%, 90%, 95%, or 100% of the probe sets comprise or consist of one or more isolated polynucleotides that selectively hybridize to one of the 2 or 3 recited nucleic acids.

[0163] In a further preferred embodiment of the fifth aspect of the invention, the different probe sets in total selectively hybridize to at least two different nucleic acids according to Formula I having X2 groups as follows:
[0164] a) one or more of SEQ ID NO:57-59 (includes NR1D1), or complements thereof; and
[0165] b) SEQ ID NO:40 (includes SMARCE1), or complements thereof.

[0166] This embodiment (“HR− composition 2”) is demonstrated herein to be particularly effective for classifying hormone receptor negative breast tumors, where “hormone receptor negative” is defined as negative for either or both of estrogen receptors and progesterone receptors. In a further embodiment of the HR− composition 2, the different probe sets in total selectively hybridize to one or more of SEQ ID NO:41-43 (includes BIRC5), or complements thereof. In various further preferred embodiments of HR-composition 2, the different probe sets in total selectively hybridize to one or more nucleic acid from each of the following groups:
[0167] (a) SEQ ID NOS:328-415 (unique sequence probes from the NR1D1-containing BAC), or complements thereof; and
[0168] (b) SEQ ID NOS:66-159 (unique sequence probes from the SMARCE-containing BAC), or complements thereof.

[0169] Nucleic acids in group (a) are unique sequence regions from the BAC including NR1D1, and nucleic acids in group (b) are unique sequence regions from the BAC including SMARCE. Thus, this embodiment of HR-composition 2 provides unique sequence probes for use if the methods of the invention, which obviates the need for competitor DNA in hybridization assays. In a further embodiment, the unique sequence probes for HR− composition 2 include probe sets comprising or consisting of polynucleotides that selectively hybridize to one or more nucleic acid from the groups:
[0170] (c) SEQ ID NOS:416-511 (unique sequence probes from the BIRC5-containing BAC), or complements thereof.

[0171] In these embodiments of HR− composition 2, it is further preferred that at least 45%, 50%, 55%, 60%, 65%, 70%, 80%, 85%, 90%, 95%, or 100% of the probe sets comprise or consist of one or more isolated polynucleotides that selectively hybridize to one of these 3 recited nucleic acids.

[0172] In various further preferred embodiments of the methods of the invention, the polynucleotides in the probe set independently comprise or consist of at least 10, 15, 20, 25, 30, 35, 40, 45, 50, 55, 60, 65, 70, 75, 80, 85, 90, 95, 100, 150, 200, 250, 300, 350, 400, 450, 500, 550, 600, 650, 700, 750, 800, 850, 900, 950, 1000, 1100, 1200, 1300, 1400, 1500, 1600, 1700, 1800, 1900, 2000, 2100, 2200, 2300, 2400, 2500, 2600, 2700, 2800, 2900, 3000, 3100, 3200, 3300, 3400, 3500, 3600, 3700, 3800, 3900, 4000, 4100, 4200, 4300, 4400, 4500, 4600, 4700, 4800, 4900, 5000, 5100, 5200, 5300, 5400, 5500, 5600, 5700, 5800, 5900, 6000, 6100, 6200, 6300, 6400, 6500, 6600, 6700, 6800, 6900, 7000, 7100, 7200, 7300, 7400, 7500, 7600, 7700, 7800, 7900, 8000, 8100, 8200, 8300, 8400, 8500, 8600, 8700, 8800, 8900, 9000, 9100, 9200, 9300, 9400, 9500, 9600, 9700, 9800, 9900, 10,000; 15,000; 20,000; 25,000; 30,000; 35,000; 40,0000; 45,000; 50,000; 60,000; 70,000; 80,000; 90,000; 100,000; 110,000; 120,000; 130,000; 140,000; 150,000; 160,000; 170,000; 180,000; 190,000; 200,000; 210,000; or 220,000 nucleotides of the relevant sequence.

[0173] In various further embodiments of the methods of the invention, the compositions comprise a breast cancer biomarker comprising or consisting of between 2 and 42 different probe sets, wherein at least 40% of the different probe sets comprise one or more isolated polynucleotides that selectively hybridize to a nucleic acid according to one of SEQ ID NO:1-17 or complements thereof; wherein the different probe sets in total selectively hybridize to at least two of the recited nucleic acids according to SEQ ID NO:1-17 or complements thereof. In various preferred embodiments, the composition comprises a breast cancer biomarker consisting of three, four, five, six, seven, eight, nine, ten, eleven, twelve, thirteen, fourteen, fifteen, sixteen, or seventeen different probe sets that selectively hybridize to a nucleic acid according to one of SEQ ID NO:1-17 or complements thereof, wherein the different probe sets in total selectively hybridize to at least three, four, five, six, seven, eight, nine, ten, eleven, twelve, thirteen, fourteen, fifteen, sixteen, or seventeen of the recited nucleic acids according to SEQ ID NO:1-17 or complements thereof. In each of these embodiments, it is further preferred that at least 45%, 50%, 55%, 60%, 65%, 70%, 80%, 85%, 90%, 95%, or 100% of the probe sets for a given breast cancer biomarker comprise or consist of one or more isolated polynucleotides that selectively hybridize to a nucleic acid according to SEQ ID NO:1-17, or complements thereof. In further preferred embodiments, the different probe sets of a breast cancer biomarker comprise or consist of one or more polynucleotides of at least 10 nucleotides of a nucleic acid according to SEQ ID NO:1-17, or complements thereof. In various further preferred embodiments, the isolated polynucleotides comprise or consist of at least 10, 15, 20, 25, 30, 35, 40, 45, 50, 55, 60, 65, 70, 75, 80, 85, 90, 95, 100, 150, 200, 250, 300, 350, 400, 450, 500, 550, 600, 650, 700, 750, 800, 850, 900, 950, or 1000 nucleotides according to a nucleic acid selected from the group consisting of SEQ ID NO:1-17, or complements thereof. In further embodiments, the isolated polynucleotide comprises or consists of a nucleic acid according to one of SEQ ID NO:1-17, or complements thereof.

[0174] In a preferred embodiment of each embodiment of the fifth aspect of the invention, the method comprises calculating a prognostic index, by employing a linear combination of the log(target copy numbers) with coefficients computed from a logistic regression analysis. Based on the value of the prognostic index, the samples are categorized into appropriate risk groups, for example, low, moderate, and high. For example, a prognostic index for a 3-probe set breast cancer biomarker can take the form of:
PI(prognostic index)=a1*log(copy number gene 1)+a2*log(copy number gene 2)+a3*log(copy number gene 3).

[0175] For example, suppose that through a prior analysis, the coefficients were found to be:
[0176] a1=1,
[0177] a2=1,
[0178] a3=−2,

[0179] And that a PI<1 was found to correspond to a low risk of recurrence.

[0180] For a breast cancer patient with a tumor having the following characteristics:
[0181] Copy number gene 1=4.
[0182] Copy number gene 2=2.
[0183] Copy number gene 3=4.

[0184] The PI is computed as:
[0185] PI=1*log(4)+1*log(2)-2*log(4)=−0.693<1, so this patient would be considered at low risk of distant recurrence.

[0186] Let CNi denote the copy number for gene i. Note that the PI may be written as PI=log((CN1\hat{ }a1)*(CN2\hat{ }a2)*(CN3\hat{ }a3)). Given that PI is predictive of recurrence, then so is exp(PI), and thus we can define a new prognostic index as:
PI=(CN1\hat{ }a1)*(CN2\hat{ }a2)*(CN3\hat{ }a3).

[0187] If there are both positive and negative coefficients, then this PI can be expressed as a ratio. For the example coefficients above:
PI=CN1*CN2/CN3\hat{ }2.

[0188] In another example, the prognostic index can be a ratio of gene copy numbers, such as:

[0189] Hormone+: PI=CYP24*BIRC5/(PDCD6IP²), where the gene name denotes the copy number of that gene. For example, suppose that through a prior analysis PI<1 was found to correspond to a low risk of recurrence. For a breast cancer patient with a tumor having the following characteristics:
[0190] CYP24=4.
[0191] BIRC5=4.
[0192] PDCD6IP=2.

[0193] The PI is computed as: PI=4*4/(2\hat{ }2)=4>1, so this patient would be considered at a higher risk of distant recurrence.

[0194] Hormone−: PI=NR1D1²/(BIRC5*SMARCE1), where the gene name denotes the copy number of that gene. For example, suppose that through a prior analysis PI<(½) was found to correspond to a low risk of recurrence. For a breast cancer patient with a tumor having the following characteristics:
[0195] SMARCE1=4.
[0196] NR1D1=2.
[0197] BIRC5=4.

[0198] The PI is computed as: PI=(2A2)/(4*4)=¼<½, so this patient would be considered at a low risk of distant recurrence.

[0199] For test implementation, ratio predictors have certain advantages over linear combination predictors. The above ratio PI's are unit-less: any bias in gene copy measurements will tend to cancel out.

[0200] Any conditions, including hybridization reagents and wash conditions to remove unbound probe, in which the nucleic acid probes bind selectively to the target in the nucleic acid sample to form a hybridization complex, and minimally or not at all to other sequences, can be used in the methods of the present invention, as discussed above. Further optional steps can include, but are not limited to, pre-hybridization of the nucleic acid sample and use of competitor nucleic acids.

[0201] Any method for detecting formation of hybridization complexes and determining an alteration in gene copy number can be used, including but not limited to in situ hybridization (such as fluorescent in situ hybridization (FISH)), polymerase chain reaction (PCR) analysis, reverse transcription polymerase chain reaction (RT-PCR) analysis, Southern blotting, Northern blotting, array-based methods, and/or comparative genomic hybridization.

[0202] In a preferred embodiment, detection is performed by in situ hybridization (“ISH”). In situ hybridization assays are well known to those of skill in the art. Generally, in situ hybridization comprises the following major steps (see, for example, U.S. Pat. No. 6,664,057): (1) fixation of tissue, biological structure, or nucleic acid sample to be analyzed; (2) pre-hybridization treatment of the tissue, biological structure, or nucleic acid sample to increase accessibility of the nucleic acid sample (within the tissue or biological structure in those embodiments), and to reduce nonspecific binding; (3) hybridization of the probe to the nucleic acid sample; (4) post-hybridization washes to remove probe not bound in the hybridization and (5) detection of hybridization complexes. The reagent used in each of these steps and their conditions for use varies depending on the particular application. In a particularly preferred embodiment, ISH is conducted according to methods disclosed in U.S. Pat. Nos. 5,750,340 and/or 6,022,689, incorporated by reference herein in their entirety.

[0203] In a typical in situ hybridization assay, cells are fixed to a solid support, typically a glass slide. The cells are typically denatured with heat or alkali and then contacted with a hybridization solution to permit annealing of labeled probes specific to the target nucleic acid sequence. The polynucleotides of the invention are typically labeled, as discussed above. In some applications it is necessary to block the hybridization capacity of repetitive sequences. In this case, human genomic DNA or Cot-1 DNA is used to block non-specific hybridization.

[0204] In a further embodiment, an array-based format can be used in which the polynucleotides of the invention can be arrayed on a surface and the human nucleic sample is hybridized to the polynucleotides on the surface. In this type of format, large number of different hybridization reactions can be run essentially “in parallel.” This provides rapid, essentially simultaneous, evaluation of a large number of nucleic acid probes. Methods of performing hybridization reactions in array based formats are also described in, for example, Pastinen (1997) Genome Res. 7:606-614; (1997) Jackson (1996) Nature Biotechnology 14:1685; Chee (1995) Science 274:610; WO 96/17958. Methods for immobilizing the polynucleotides on the surface and derivatizing the surface are known in the art; see, for example, U.S. Pat. No. 6,664,057, and are also described above.

[0205] In a sixth aspect, the present invention provides methods for classifying a breast tumor comprising:
[0206] (a) contacting a mRNA-derived nucleic acid sample obtained from a subject having a breast tumor with nucleic acid probes that, in total, selectively hybridize to two or more nucleic acid targets selected from the group consisting of SEQ ID NO:1-17 or complements thereof; wherein the contacting occurs under conditions to promote selective hybridization of the nucleic acid probes to the nucleic acid targets, or complements thereof, present in the nucleic acid sample;
[0207] (b) detecting formation of hybridization complexes between the nucleic acid probes to the nucleic acid targets, or complements thereof, wherein a number of such hybridization complexes provides a measure of gene expression of the one or more nucleic acids according to SEQ ID NO:1-17; and
[0208] (c) correlating an alteration in gene expression (ie, an increase or decrease) of the one or more nucleic acids according to SEQ ID NO:1-17 relative to control with a breast cancer classification. In a preferred embodiment, the classification comprises breast cancer recurrence.

[0209] The method according to the sixth aspect of the invention detects alterations in gene expression of one or more of the markers according to SEQ ID NO:1-17 relative to a control with a modification in expression relative to control correlating with a classification of the breast tumor as likely to recur.

[0210] Any control known in the art can be used in the methods of the invention. For example, the expression level of a gene known to be expressed at a relatively constant level in both cancerous and non-cancerous tumor tissue can be used for comparison. Alternatively, the expression level of the genes targeted by the probes can be analyzed in non-cancerous RNA samples equivalent to the test sample. Those of skill in the art will recognize that many such controls can be used in the methods of the invention.

[0211] In the sixth aspect of the invention the methods are used to detect gene expression alterations associated with breast cancer. As used herein “associated with breast cancer” means that an altered expression level of one or more of the markers can be used to classify a feature of the breast tumor or the prognosis of a patient from whom the nucleic acid sample was taken, including the following:
[0212] (a) Diagnosis of breast cancer (benign vs. malignant tumor);
[0213] (b) Metastatic potential, potential to metastasize to specific organs, or course of the tumor;
[0214] (c) Stage of the tumor;
[0215] (d) Patient prognosis in the absence of chemotherapy or hormonal therapy;
[0216] (e) Prognosis of patient response to treatment (chemotherapy, radiation therapy, and/or surgery to excise tumor)
[0217] (f) Predicted optimal course of treatment for the patient;
[0218] (g) Prognosis for patient relapse after treatment; and
[0219] (h) Patient life expectancy.

[0220] Thus, the methods of this aspect of the invention provide information on, for example, breast cancer diagnosis, and patient prognosis in the presence or absence of chemotherapy, a predicted optimal course for treatment of the patient, and patient life expectancy. In a preferred embodiment, the breast cancer classification comprises a prognosis of the recurrence of the breast tumor. In a further preferred embodiment, an altered expression level of the one or more nucleic acid targets is correlated with an increased recurrence rate of the breast tumor compared to control. As used herein, “recurrence” means tumor local recurrence (including ipsilateral, local, or contralateral), metastasis, or death from breast cancer.

[0221] In a further preferred embodiment, alterations in the normal expression levels of the one or more nucleic acid targets are correlated with a higher risk of recurrence of the breast tumor. One skilled in the art will understand that “alteration in the expression levels” means any deviation from the level of expression relative to the same normal healthy tissue. It is further understood that “increased risk” means to be at a higher risk relative to all others having similar or identical clinical and/or pathological characteristics, in the absence of the information obtained using the markers as described herein.

[0222] As used herein for all aspects and embodiments of the method, an alteration (ie: an increase or decrease) in gene expression relative to control is any increase or decrease relative to normal tissue counterpart of the disease state. In various embodiments, the increase or decrease is at least a 10%, 20%, 30%, 40%, 50%, 60%, 70%, 80%, 90%, 100%, 200%, or greater increase or decrease.

[0223] Thus, the invention further provides methods for making a treatment decision for a breast cancer patient, comprising carrying out the methods for classifying a breast tumor according to the different aspects and embodiments of the present invention, and then weighing the results in light of other known clinical and pathological risk factors, in determining a course of treatment for the breast cancer patient. For example, a patient that is shown by the methods of the invention to have an increased risk of recurrence could be treated more aggressively with standard therapies, such as chemotherapy, radiation therapy, and/or surgical removal of the tumor.

[0224] The mRNA-derived nucleic acid sample used in the methods of the present invention can be mRNA or cDNA derived from the mRNA. The RNA sample used in the methods of the present invention can be from any source useful in classifying a breast tumor, including but not limited to breast tissue samples, fibroids, and blood samples including bone marrow cells. In a preferred embodiment, the RNA sample is a human RNA sample. The nucleic acid sample is preferably a human cellular DNA or RNA sample, such as a sample prepared for in situ hybridization.

[0225] In various preferred embodiments of the methods of the sixth aspect of the invention, the nucleic acid probes are selected from the various aspects and embodiments of the compositions disclosed above, particularly the third aspect of the invention and preferred embodiments thereof. In a most preferred embodiment, the polynucleotides of the probe sets comprise a detectable label, as disclosed above, and in particular the different probe sets comprise distinguishable detectable labels, to facilitate analysis of gene expression of multiple targets.

[0226] In various other preferred embodiments, the nucleic acid probes in total selectively hybridize to three, four, five, six, seven, eight, nine, ten, eleven, twelve, thirteen, fourteen, fifteen, sixteen, or seventeen different nucleic acids according to SEQ ID NO:1-17 or complements thereof, and the alteration in gene expression of two, three, four, five, six, seven, eight, nine, ten, eleven, twelve, thirteen, fourteen, fifteen, sixteen, or seventeen of the nucleic acids according to SEQ ID NO:1-17, or complements thereof, are correlated with a breast cancer classification, preferably with recurrence.

[0227] In a further preferred embodiment of the sixth aspect of the invention, the composition for use comprises different probe sets that in total selectively hybridize to at least SEQ ID NO:17 (CYP24), and SEQ ID NO:10 (PDCD6IP), or complements thereof. This embodiment (“HR+ composition 3”) is demonstrated herein to be particularly effective for classifying hormone receptor positive breast tumors, where “hormone receptor positive” is defined as positive for either or both of estrogen receptors and progesterone receptors. In this embodiments of HR+ composition 3, it is further preferred that the different probe sets in total selectively hybridize to SEQ ID NO:9 (BIRC5). In these various embodiments of HR+ composition 3, it is further preferred that at least 45%, 50%, 55%, 60%, 65%, 70%, 80%, 85%, 90%, 95%, or 100% of the probe sets comprise or consist of one or more isolated polynucleotides that selectively hybridize to one of these 2 or 3 recited nucleic acids.

[0228] In a further preferred embodiment of the sixth aspect of the invention, the composition for use comprises different probe sets that in total selectively hybridize to at least SEQ ID NO:15 (NR1D1) and SEQ ID NO:8 (SMARCE1), or complements thereof. This embodiment (“HR− composition 3”) is demonstrated herein to be particularly effective for classifying hormone receptor negative breast tumors, where “hormone receptor negative” is defined as negative for either or both of estrogen receptors and progesterone receptors. In this embodiment of HR− composition 3, it is further preferred that the different probe sets in total selectively hybridize to SEQ ID NO:9 (BIRC5). In these various preferred embodiments of HR− composition 3, it is further preferred that the different probe sets in total selectively hybridize to at least 45%, 50%, 55%, 60%, 65%, 70%, 80%, 85%, 90%, 95%, or 100% of the probe sets comprise or consist of one or more isolated polynucleotides that selectively hybridize to one of these 3 recited nucleic.

[0229] Such probes according to this aspect of the invention can be of any length that permit selective hybridization under stringent conditions to the nucleic acid of interest, and preferably are at least 10 nucleotides in length. In various further embodiments, the probes according to this embodiment are at least 15, 20, 25, 30, 35, 40, 45, 50, 55, 60, 65, 70, 75, 80, 85, 90, 95, 100, 150, 200, 250, 300, 350, 400, 450, 500, 550, 600, 650, 700, 750, 800, 850, 900, 950, 1000 nucleotides in length. In a further embodiment, the probes according to this aspect of the invention are complementary to the entire recited nucleic acid. The probes of this embodiment may be RNA or DNA and may be single or double stranded.

[0230] In a most preferred embodiment of this aspect, the nucleic acid probes comprise or consist of single stranded anti-sense polynucleotides of the nucleic acid compositions of the invention. For example, in mRNA fluorescence in situ hybridization (FISH) (ie. FISH to detect messenger RNA), only an anti-sense probe strand hybridizes to the single stranded mRNA in the RNA sample, and in that embodiment, the “sense” strand oligonucleotide can be used as a negative control.

[0231] Alternatively, DNA probes can be used as probes, preferably those according to the compositions of the invention. In this embodiment, it is preferable to distinguish between hybridization to cytoplasmic RNA and hybridization to nuclear DNA. There are two major criteria for making this distinction: (1) copy number differences between the types of targets (hundreds to thousands of copies of RNA vs. two copies of DNA) which will normally create significant differences in signal intensities and (2) clear morphological distinction between the cytoplasm (where hybridization to RNA targets would occur) and the nucleus will make signal location unambiguous. Thus, when using double stranded DNA probes, it is preferred that the method further comprises distinguishing the cytoplasm and nucleus in cells being analyzed within the bodily fluid sample. Such distinguishing can be accomplished by any means known in the art, such as by using a nuclear stain such as Hoechst 33342, or DAPI which delineate the nuclear DNA in the cells being analyzed. In this embodiment, it is preferred that the nuclear stain is distinguishable from the detectable probes. It is further preferred that the nuclear membrane be maintained, i.e., that all the Hoechst or DAPI stain be maintained in the visible structure of the nucleus.

[0232] Hybridization conditions and other details of the methods of this aspect are as described above for altered copy number analysis. In a preferred embodiment, RNA FISH is employed using standard methods in the art.

[0233] In each of the above aspects and embodiments, detection of hybridization is typically accomplished through the use of a detectable label on the nucleic acid probes, such as those described above. The label can be directly incorporated into the polynucleotide, or it can be attached to a molecule which hybridizes or binds to the polynucleotide. The labels may be coupled to the probes in a variety of means known to those of skill in the art, as described above. In a preferred embodiment, the detectable labels on the different probe sets of the compositions of the invention are distinguishable from each other, as discussed above. The label can be detected can be by any techniques, including but not limited to spectroscopic, photochemical, biochemical, immunochemical, physical or chemical techniques, as discussed above and below.

[0234] In a further aspect, the present invention provides kits for use in the methods of the invention, comprising the compositions of the invention and instructions for their use. In a preferred embodiment, the probe sets are labeled, preferably so as to distinguish different probe sets, as disclosed above. In a further preferred embodiment, the probe sets are provided in solution, most preferably in a hybridization buffer to be used in the methods of the invention. In a further embodiment, the probe sets are provided on a solid support, such as those described above. In further embodiments, the kit also comprises wash solutions and/or pre-hybridization solutions.

### EXAMPLES

### Example 1

[0235] Currently employed clinical and tumor pathology predictors of breast cancer prognosis are not very accurate. As a result, many more patients are subjected to adjuvant chemotherapy than will benefit from such treatment and many patients that will have a poor outcome are not identified early for aggressive treatment Van't Veer et al (2002) addressed the question of identifying a gene expression profile correlating with prognosis. The data collected by his group consisted of gene expression measurements across 24481 genes for 97 breast tumor samples with accompanying clinical data. Applying a univariate gene selection mechanism, they identified a group of 70 genes useful in predicting prognosis:

[0236] Van't Veer 70 gene marker

| | |
|---|---|
| Accuracy | 80.8% |
| Sensitivity | 91.2% |
| Specificity | 72.7% |

[0237] Accuracy is defined herein as the proportion of samples correctly classified by a biomarker. Sensitivity refers to the proportion of poor prognosis samples correctly classified as such, and specificity refers to the proportion of good prognosis samples correctly classified as such.

[0238] However, the clinical utility of a 70 gene marker is limited by the cost and complexity of coordinating 70 measurements. Additionally, the measurement of gene expression in solid tumor tissue samples requires tissue handling procedures not in common practice. For the clinic, an alternative implementation of the discovered molecular signatures is preferred. One such approach is FISH (fluorescence in situ hybridization) measurement of DNA aberrations. FISH is currently in wide clinical use for the characterization of a variety of tumor DNA aberrations including: chromosome aneuploidy, translocations, and gene amplification.

Mapping the Molecular Signatures

[0239] It has recently been demonstrated by Pollack et al (2002) that, for tumors of the breast, for a significant proportion of the genome, gene expression is correlated with gene amplification. From DNA copy number and RNA gene expression measurements for 6095 genes across 37 tumor samples, Pollack et al found that 12% of all gene expression variation is directly attributable to gene amplification. Additionally, they found that for highly amplified regions, 62% of the genes located in these regions exhibit moderately or highly elevated expression. Thus, for those molecular signatures that map to regions of high correlation, a FISH-based assay is an alternative to gene expression measurement. In order to identify such molecular signatures, this data was analyzed concurrently with the above-described Van't Veer gene expression data.

[0240] From this concurrent analysis, we have identified nine genes whose RNA gene expression is prognostic of disease free survival, and additionally whose RNA expression is highly correlated with DNA copy number.

Validation of Gene Selection in Independent Dataset

[0241] From a previous publication (Sorlie et al 2001) prognosis data, in the form of DFS (disease free survival), were available for a subset of the Pollack breast cancer DNA amplification data. This prognosis data was not used in the identification of the nine genes, and thus can be used to test the prognostic accuracy of the nine genes.

[0242] Of the 26 samples for which survival data are available, 18 were collected from patients with a poor prognosis (less than 5 years DFS), and 8 from patients with a good prognosis (greater than 5 years DFS). Due to the small number of samples for which DFS was available, we limited our analysis to one and two gene combinations from the previously discovered nine genes. We found that the most prognostic single gene marker (AL080059) is 73% accurate in predicting prognosis in the DNA amplification data. A combination of two (AL080059, ANXA11) of the top nine informative genes achieved the following performance on the independent prognosis data:

| | |
|---|---|
| Accuracy | 92.3% |
| Sensitivity | 94.4% |
| Specificity | 87.5% |

[0243] Listed below are 17 genes resulting from our concurrent analysis of gene expression, DNA amplification, and their prognostic utility in breast cancer. Included in this list are: the aforementioned 9 genes whose expression is highly correlated with amplification and also prognostic, an additional 2 genes with highly variable DNA copy number and prognostic gene expression, and an additional 6 genes determined directly from the DNA copy number data and Sorlie DFS data.

TABLE 3
Breast Cancer Prognosis Genes

| NAME | GenBank Accession | Method of discovery |
|---|---|---|
| noname | AL080059 | dna/rna correlation |
| stk3 | NM_006281 | dna/rna correlation |
| ext1 | NM_000127 | dna/rna correlation |
| rad21 | NM_006265 | dna/rna correlation |
| anxa11 | NM_001157 | dna/rna correlation |
| fanca | NM_000135 | dna/rna correlation |
| znf144 | NM_007144 | dna/rna correlation |
| smarce | NM_003079 | dna/rna correlation |
| birc5 | NM_001168 | dna/rna correlation |
| pdcd6ip | NM_013374 | dna amplification |
| grb7 | NM_005310 | highly variable copy number |
| mln64 | NM_006804 | highly variable copy number |
| cyp24 | NM_000782 | dna amplification |
| impal | NM_005536 | dna amplification |
| hepsin | NM_002151 | dna amplification |
| nr1d1 | X72631 | dna amplification |
| znf207 | NM_003457 | dna amplification |

[0244] Thus, each of these genes can be used in marker sets for genomic DNA amplification associated with breast cancer.
[0245] van't Veer, L. J. et al. Gene expression profiling predicts clinical outcome of breast cancer. Nature. 2002 (415):530-536
[0246] Pollack, J. R. et al. Microarray analysis reveals a major direct role of DNA copy number alteration in the transcriptional program of human breast tumors. Proc Natl Acad Sci USA 2002 Oct. 1; 99(20):12963-8
[0247] Sorlie, T. et al. Gene expression patterns of breast carcinomas distinguish tumor subclasses with clinical implications. Proc Natl Acad Sci USA. 2001 Sep. 11; 98(19):10869-74.

### Example 2

### Validation of Multiplex Genomic Markers for Predicting Breast Cancer Recurrence in a FISH Assay Format

[0248] Predicting risk of recurrence in breast cancer patients is currently limited, resulting in the possibility of unnecessary adjuvant chemotherapy for some women and difficulty identifying those who could benefit from more aggressive treatment. Subsets of gene markers whose copy numbers are predictive of recurrence in breast cancer are described above. To validate the prognostic value of these patterns, we correlated copy number with recurrence using combinations of subsets of these markers in surgical specimens from women with invasive breast cancer. We measured the copy number of 17 candidate genomic markers, using fluorescent in situ hybridization (FISH) assays of paraffin embedded surgical specimens from 229 patients with early stage invasive cancer and known clinical outcomes with mean follow-up of 8.9 years. Univariate analysis showed that DNA copy number of 11 of the 17 candidate genomic markers in tumors was predictive of distant recurrence (P<0.001 to <0.03). We also identified predictive subsets of the 17 genomic markers.

Study Population

[0249] Medical records from 723 cases of breast cancer diagnosed at the University of New Mexico Hospital between 1986 and 1999 were reviewed and 308 eligible cases were identified. Eligibility criteria included a diagnosis of Stage I, II or III invasive ductal carcinoma, availability of original clinical and pathological records, availability of archived tumor specimen, and at least four years of clinical follow-up. Mean follow-up was 8.9 years. Recurrence was defined as clinical evidence of metastasis or death from breast cancer. The study population consisted of 98 Stage 1 (33%), 118 Stage III (38%), and 61 Stage III (20%) patients. Treatments included mastectomy (59%), mastectomy/radiation (14%), lumpectomy (4%) and lumpectomy/radiation (21%). (Six patients underwent biopsy only biopsy only.) Patients received adjuvant hormone treatment (25%), chemotherapy (29%), chemotherapy and hormone treatment (15%) or no adjuvant treatment (22%). Tumors were classified as hormone receptor positive (HR+) if positive for either (or both) estrogen or progesterone receptors. Two hundred and nine (209) cases (68%) were HR+ and 83 (27%) were HR−. (Hormone status was undetermined in 16 cases, 5%).

[0250] Factors found to be significant predictors of recurrence included: younger age (P=4.3×10-4), pathological stage greater than pT1 (P=1.0×10-5), overall stage greater than I (P=6.0×10-6) and node status greater than N0 (P=4.2×10-8).

[0251] Neither hormone status (P=0.3208) nor ethnic origin (Caucasian vs. other, Hispanic vs. others, and Non-Caucasian vs others, P=>0.75) were found to be significant predictors of recurrence. Among the node negative group, neither age (P=0.4485) nor tumor size (P=0.1996) were found to be predictors of recurrence.

[0252] Pathology reports and microscopic slides were reviewed and diagnostic blocks selected for sectioning for FISH studies. FISH data were collected on 265 cases. The hybridizations were performed on serial sections and the personnel performing the hybridizations and signal collection were blinded to both the probe identities and clinical histories. The genomic probes used in this study were selected from the human “32K” BAC Re-Array (Children's Hospital Oakland Research Institute, http://bacpac.chori.org/). BAC clone inserts were verified by PCR and the chromosome localization verified by FISH hybridization to mitotic chromosomes. The 17 BAC probes were hybridized in pairs (labeled with Spectrum Red or Spectrum Green fluorochrome), and hybridizations followed standard protocols for sample deparaffinization, hybridization, and wash. Hybridization signals were collected, imaged, stored, and analyzed using MetaCyte automated FISH analytical hardware and software (MetaSystems, Altlusscheim, Germany). Generally, twenty 40× fields of view with good signal quality were operator-selected for each probe pair, and then captured in Metacyte. Regions not containing carcinoma cells (e.g. stromal or infiltrating lymphocytic cells) were excluded from further analysis using a process we refer to as “Virtual Microdissection.” Typically FISH signals from at least one hundred cells (usually 200) from at least 2 fields of view (usually 5-6) were analyzed for each gene probe pair. A few specimens (>5%) yielded smaller numbers of analyzable cells. Signal count data were collected in a “tiling” pattern designed by MetaSystems to minimize the effects of non-uniform distribution of nuclei in thin sections. Data were then transferred in flat file format for computational analysis.

Methods and Results—Data Analysis

[0253] Raw Data. Raw data (DNA copy number per tile) were normalized to copy number per nuclear equivalent volume (NEV) by dividing the observed FISH signals per nuclear DAPI-stained cross-sectional area by a computed cross-sectional area per nuclear equivalent volume (Pahlplatz et al, 1995). Of the 308 cases eligible for the study, FISH data were obtained from 265 specimens. Thirty-one (31) cases had been collected after neo-adjuvant therapy, and five specimens were associated with local recurrences. These 36 cases were set aside for further study and are excluded from the analysis reported here, leaving 229 cases for analysis. Mean numbers of DNA copy number per nuclear equivalent volume (NEV) across all specimens are summarized in the histogram below.

[0254] Univariate Analysis. For the 18 probes, univariate analysis revealed that 11 were significantly associated with distant recurrence at p<0.05 (Wilcoxon test). P values for the individual genes are reported in the table below. This result can be compared with the number of expected false positives for no association between copy number and recurrence. For 18 probes, on average less than one probe would be determined significant at p=0.05. Thus these results validate the techniques employed in the original selection of the probes. However, we do not find any individual probes sufficiently prognostic to be clinically viable. Combinations of probes are required.

[0255] Patterns of DNA copy number. Patterns of copy number measurements for subsets of the 17 unique genomic regions correlating with distant recurrence were evaluated with respect to the performance of each subset's prognostic index. The prognostic index maps a score calculated from the copy numbers of the predictive pattern to risk of recurrence. The search for predictive patterns was conducted in a randomly chosen training set in each analysis. The remaining samples were withheld as a blinded test set. The prognostic index scores were grouped in low, moderate and high risk categories, and negative and positive predictive values were calculated. Prognostic patterns were studied in Hormone Positive (HR+) and Hormone Negative (HR−) cases. The best prognostic pattern in each subgroup was further tested on the subset of cases that was lymph node negative (HR+, N−). The gene composition of the Hormone Receptor Positive marker (HR+ marker) and the Hormone Receptor Negative marker (HR− marker) are presented below and in Table 4.

Three Gene Combinations:

[0256] Two distinct best combinations of 3 genes were predictive of recurrence in breast cancer:
   [0257] One for hormone receptor positive, Stage I, Stage II, & Stage III cases (where hormone receptor positive is defined as positive for either or both of estrogen receptors and progesterone receptors) Genes are: CYP24, PDCD6IP, BIRC 5
      [0258] This marker is also predictive in a subset that is hormone positive and node negative.
   [0259] One for hormone negative cases (estrogen receptor and progesterone receptor negative) Genes are N1RD1, SMARCE1, BIRC 5
[0260] The “combination” is specified by a function that includes coefficients that weight the importance of each gene to the classifier.
   Two Gene Combinations:
[0261] For both the HR+ and HR-cases combinations of two of the three genes are also predictive of recurrence.
   [0262] For HR+:CYP 24, PDCD6IP
   [0263] For HR−:NR1D1, SMARCE 1

[0264] For the two genes, the “combination” may be specified by a function as in the case of the three gene combinations above or as a ratio, linear or non-linear, of the copy numbers of the two. When the amplification of the two genes is not correlated (i.e. the ratio is different form the number one) there is a high risk of recurrence.

TABLE 4

| Marker | Genes |
|---|---|
| Hormone Positive | CYP24, PDCD6IP, |
| (HR+ Marker) | BIRC5 |
| Hormone Negative | NR1D1, SMARCE1, |
| (HR− Marker) | BIRC5 |

Summary of Data Analyses

[0265] For this investigation we developed an algorithm for ranking combinations based on their ability to categorize samples into two or more risk groups. The algorithm employs a linear combination of the log (copy numbers) with coefficients computed from a logistic regression analysis. We term this linear combination the prognostic index. From the value of the prognostic index, the samples are categorized into risk groups. An objective function, based primarily on the actual risk difference between assigned low-risk and high-risk groups, was used in a global search to rank combinations and identify predictive combinations.

[0266] In the search phase, only a ‘training’ subset (25%-50%) of the data was used. The remaining samples were blinded as to recurrence, and used for testing of the identified predictive combinations. We found that the top performing combinations, as determined with the training data, also performed well on the blinded test data.

[0267] DNA copy number of genomic markers at each of two trios of loci [NR1D1, SMARCE1 and BIRC5] and [CYP24, PDCD6IP and BIRC5] powerfully predicted recurrence in hormone receptor negative and positive cancers, respectively. Based on the patterns of genomic marker amplification, patients could be placed into low and high risk groups with recurrences of 9% and 58%, respectively, in hormone receptor negative tumors and 9% and 50%, respectively, in hormone receptor positive cancers. The equations derived from the logistic regression analyses are of the form:
PI(prognostic index)=a1*log(copy number gene 1)+a2*log(copy number gene 2)+a3*log(copy number gene 3).

[0268] For both the hormone positive and hormone negative combinations, we noted that the computed coefficients were such that a ratio of gene copy numbers might be as significant a predictor as the above. In particular, we found the following ratio-based PI's to be significant predictors in our samples:
[0269] Hormone+: PI=CYP24*BIRC5/(PDCD6IP\hat{ }2),
[0270] Hormone−: PI=NR1D1\hat{ }2/(BIRC5*SMARCE1)
[0271] where the gene name denotes the copy number of that gene.

[0272] For test implementation, ratio predictors have certain advantages over linear combination predictors. The above ratio PI's are unit-less: any bias in gene copy measurements will tend to cancel out.

TABLE 5
PGA FISH Univariate Analysis

| Probe | location | p (Wilcoxon) |
|---|---|---|
| CYP24 | 20q13.2 | 0.001 |
| EXT1 | 8q24.11 | 0.002 |
| NR1D1 | 17q21.1 | 0.003 |
| MLN64 | 17q12 | 0.003 |
| FANCA | 16q24.3 | 0.004 |
| BIRC5 | 17q25.3 | 0.007 |
| ZNF144 | 17q12 | 0.008 |
| RAD21 | 8q24.11 | 0.012 |
| GRB7 | 17q12 | 0.016 |
| HEPSIN | 19q13.12 | 0.02 |
| ZNF207 | 17q11.2 | 0.03 |
| STK3 | 8q22.2 | 0.051 |
| IMPA1 | 8q21.13 | 0.062 |
| AL080059 | 8q22.1 | 0.073 |
| SMARCE1 | 17q21.2 | 0.075 |
| ANXA11 | 10q22.3 | 0.086 |
| SMARCE1 (dup) | 17q21.2 | 0.153 |
| PDCD6IP | 3p23 | 0.526 |

[0273] If no markers were associated with recurrence, on average less than one false positive would be expected at p<0.05. 11 markers were associated with recurrence at p<0.05

### CONCLUSIONS

[0274] 1. The PGA FISH™ method described here is a valid assay for assessing gene copy number in archived tissue samples.

[0275] 2. The PGA FISH™ method allows assessment of gene copy number exclusively in carcinoma cells rather than stromal or inflammatory cells.

[0276] 3. 13 of the 17 genes were validated to either univariately predict recurrence or to participate in multiplex patterns that are prognostic. We found a three-gene marker (NR1D1, SMARCE1, BIRC5) in a training set that was prognostic for low risk of recurrence in women with hormone receptor negative (HR−) cancers. The marker's negative predictive value was 91% in independent test sets.

[0277] 4. We found a second 3-gene marker (CYP24, PDCD6IP, BIRC5) in a training set that is prognostic for low risk of recurrence in women with hormone receptor positive (HR+) cancers. The marker's negative predictive value was also 91% in independent test sets.

[0278] 5. In women with hormone receptor negative, lymph node negative (HR−, N0) cancers, the first marker marker (SMARCE1, NR1D1, and BIRC5) had a NPV of 100% in a test set (0 of 4 women).

[0279] 6. In women with hormone receptor positive, lymph node negative (HR+, N0) cancers, the second marker (CYP24, PDCD6IP, and BIRC5) had a NPV of 100% in a test set (0 of 15 women). The prognostic value of these genomic markers will be studied in larger numbers of women with hormone receptor positive, node negative (HR+, N0), and hormone receptor negative, node negative (HR−, N0) cancers.

[0280] It will be apparent to those of skill in the art that in each of these cases, at least one marker that did not show statistical significance as a univariate marker, pdcd6ip (43r), is present in each of the three multivariate probe sets described above. In contrast, none of the multivariate sets include both of the markers with the greatest statistical significance as univariate probes (77r (ext1) and 82 g (birc5)). While not being bound by any specific theory, we hypothesize that the combinations of markers disclosed herein as the greatest predictors of recurrence provide markers for different cellular pathways, and thus their combination provides added information over and above other combinations of markers with more significance as univariate markers, but which provide redundant information on the same or similar cellular pathways. This representation of different cellular pathways may make the combination markers presented in these examples likely candidates for predicting the effectiveness of treatment with combinations of drugs targeted as those distinct cellular pathways.

### Example 3

[0281] 5 BAC DNAs were selected, those for NR1D1, SMARCE1, BIRC5, CYP24A, and PDCD6IP. The BACs were selected from the “32K human genome BAC Rearray”, maintained at the CHORI (http://bacpac.chori.org/). The sizes of the BACS in this example range from 154-178 kb. Details of individual BACs are summarized in Table 6.

TABLE 6

| Clone | Size of BAC (kb) | Chromosome Location |
|---|---|---|
| NR1D1 | 162 | 17q21.1 |
| SMARCE1 | 174 | 17q21.2 |
| BIRC5 | 178 | 17q25.3 |
| CYP24 | 171 | 20q13.2 |
| PDCD6IP | 154 | 3p23 |

[0282] The repetitive elements of the BACs were identified using the “Mask Repeat” function at the UCSC Genome Bioinformatics database, and repeat-free sequences of the BACs were obtained using the “Get DNA” function (http://genome.ucsc.edu/index.html?org=Human).

[0283] The sequence of the related BAC clone for each marker was down loaded from Human UCSC Genome browser with the repetitive sequences marked. Primers were selected from both ends of a unique sequence area of no less than 300 bp length. Primers were designed for each BAC using the “Fast PCR” program.

TABLE 7
PCR primers and products

| | | | Number of bp |
|---|---|---|---|
| | Number of PCR | Average size of | in unique |
| Clone | primer pairs | PCR products | sequence probe |
| NR1D1 | 88 | 925 bp | 81 kb |
| SMARCE1 | 94 | 1720 bp | 81 kb |
| BIRC5 | 96 | 814 bp | 78 kb |
| CYP24 | 72 | 877 bp | 63 kb |
| PDCD6IP | 96 | 1240 bp | 60 kb |

[0284] PCR was carried out as follows:

[0285] PCR Master Mix from Promega (Catalog # M7505) was used for PCR. Reaction buffer: 25 units/ml of Taq DNA Polymerase, in Promega's proprietary reaction buffer -(pH 8.5), 200 uM dATP, 200 uM dGTP, 200 uM dCTP, 200 uM dTTP, 1.5 mM MgCl2.

[0286] Cycling conditions:
[0287] 1. 5 minutes at 95° C.;
[0288] 2. 15 seconds at 95° C.;
[0289] 3. 30 seconds at 56° C.; (This temperature varies depending on the annealing temperature of the primer.)
[0290] 4. 2 minutes at 72° C.;
[0291] 5. go to step 2 for 30 times;
[0292] 6. 3 minutes at 72° C.;

[0293] Primer concentration was 1 uM.

[0294] Template concentration:

[0295] The BAC clone concentration for the first run PCR was between 0.3 and 0.5 ng/ul. For the second run PCR, 1/100 volume of the first run PCR reaction mix was used as template and concentration was not determined.

[0296] For a 50 ul first run PCR reaction, mix:
[0297] 0.3 ul BAC template (56 ng/ul);
[0298] 5 ul forward primer (10 uM);
[0299] 5 ul reverse primer (10 uM);
[0300] 25 ul 2×PCR master mix;
[0301] 14.7 ul sterile dH₂O

[0302] And run through the above cycle and store at −20° C.

[0303] For a 50 ul second run PCR reaction, mix
[0304] 0.5 ul first run PCR product;
[0305] 5 ul forward primer (10 uM);
[0306] 5 ul reverse primer (10 uM);
[0307] 25 ul 2×PCR master mix;
[0308] 14.5 ul sterile dH₂O

[0309] And run through the above cycle and store at −20° C.

[0310] The melting temperature for all the primers used ranged from 57° to 60° C. Analytical agarose gels demonstrating amplified PCR products showed that 98-99% of the reactions were successful.

[0311] The numbers of primers pairs for each BAC, the average length of the PCR products, and the total coverage of the original BAC included in the unique sequence probe are summarized in Table 8:

TABLE 8

| | complete | unique seq | amplified | % unique/ | % complete | % unique seq |
|---|---|---|---|---|---|---|
| Clones | seq bp | bp | seq bp | complete seq | seq amplified | amplified |
| PDCD6IP | 150437 | 77036 | 59000 | 0.512081469 | 39.21907509 | 76.58756945 |
| SMARCE1 | 180862 | 105440 | 79000 | 0.582985923 | 43.6797116 | 74.92412747 |
| BIRC5 | 177623 | 97050 | 76000 | 0.546381944 | 42.78725165 | 78.31014941 |
| NR1D1 | 161994 | 95161 | 80000 | 0.587435337 | 49.38454511 | 84.06805309 |
| CYP24 | 180862 | 105440 | 62000 | 0.582985923 | 34.28027999 | 58.80121396 |

[0312] The sequences of the PCR products included in the unique sequence probe are provided as follows:
[0313] a) SMARCE1 USP: SEQ ID NOS:66-159
[0314] b) PDCD6IP USP: SEQ ID NOS:160-255
[0315] c) CYP24 USP: SEQ ID NOS:256-327
[0316] d) NR1D1 USP: SEQ ID NOS:328-415; and
[0317] e) BIRC5 USP: SEQ ID NOS:416-511.

[0318] The PCR products were purified from the un-extended primers and pooled, and then aliquots of each pool were labeled with at least one of four fluorochromes: Spectrum Orange, Spectrum Green, Spectrum Red (Vysis) or DEAC (diethylaminocoumarin-5-dUTP, PerkinElmer) using Invitrogen's BioPrime DNA Labeling Kit, according to manufacturer's instructions. Unincorporated fluorochromes were purified using YM-30 microcon columns (Millipore).

[0319] Probes were hybridized either alone, in pairs, or in triplets (ie: for 1, 2, or 3 nucleic acid targets; and thus 1, 2, or 3 different USPs) to metaphase chromosomes or to breast cancer thin sections, or to sectioned tissue culture cell lines sectioned from paraffin blocks. The hybridization buffer was 20% formamide, 10% dextransulfate, 0.9% NaCl. The probe concentrations were 40 ng/μl if labeled with Spectrum Orange, Texas Red, or DEAC Aqua, and 60 ng/μl for the Spectrum Green. The specimens were hybridized at 38° C. for 14-20 hours. After hybridization, the slides were washed with 0.1% NaCl at 60° C. for 5 minutes and then in fresh 0.1% NaCl at 60° C. for 3 minutes.

[0320] For each example, the original BAC and its derivative USP were labeled with one of the four fluorochromes co-hybridized on metaphase chromosomes. In each pair of dual labeled probes. Competitor DNA was included in these hybridizations in order to suppress the repetitive sequences contained in the parental BACs. In each of the pairs, the probes co-hybridize with equal intensity to the expected chromosome region, without hybridization to any other chromosome region, and without any specific or non specific background or artifactual hybridization to any other chromosome regions. These dual hybridizations demonstrate that there is no loss of specificity or signal quality between the labeled parental BAC and its derivative USP.

[0321] On metaphase chromosomes, the signal intensities for all probes were equal for all five probes, regardless of the fluorochrome. In all cases bright, strong signals were clearly visible on the correct chromosome, without any artifactual signal on other chromosomes. There was no background hybridization randomly distributed throughout the genome, nor were there any areas of diffuse non-specific hybridization.

[0322] Multiplex hybridization of probe triplets was also tested on 5 uM formalin-fixed, paraffin embedded, interphase breast adenocarcinoma cell line thin sections. In these hybridizations, clear distinct hybridization signals were seen, in the three unique colors expected for the fluorochromes used, without artifactual signals or interfering background. Thus there is no loss of signal quality or intensity whether the probes were hybridized singly or in triplets.

[0323] Probe quality and signal strength were not dependent on particular pairs of probes and fluorochromes. Pair-wise combinations of fluorochromes and probes that have been tested are summarized in Table 9.

[0324] Table 9 summarizes the combinations of probes with fluorochromes that have been examined. Signals quality is rated ++++ if strong clear unambiguous without background or artifactual signals.

| | Spectrum | | Spectrum | |
|---|---|---|---|---|
| Clone | Orange | Texas Red | Green | DEAC Aqua |
| NR1D1 | ++++ | ++++ | | |
| SMARCE1 | | ++++ | ++++ | |
| BIRC5 | ++++ | | ++++ | ++++ |
| CYP24 | ++++ | ++++ | ++++ | ++++ |
| PDCD6IP | ++++ | ++++ | ++++ | |

1. A composition comprising a breast cancer biomarker, wherein the breast cancer biomarker consists of between 2 and 35 different probe sets, wherein at least 40% of the different probe sets comprise one or more isolated polynucleotides that selectively hybridize to a genomic region selected from the group consisting of 3p23, 8q21.13, 8q22.1, 8q22.2, 8q24.11, 10q22.3, 16q24.3, 17q11.2, 17q12, 17q21.1, 17q22.2, 17q25.3, 19q13.12, and 20q13.2; wherein the different probe sets in total selectively hybridize to at least two of the recited genomic regions.

2. The composition of claim 1 wherein the different probe set in total selectively hybridize to at least three of the recited genomic regions.

3. The composition of claim 1 wherein at least 50% of the different probe sets comprise one or more isolated polynucleotides that selectively hybridize to a genomic region selected from the group consisting of 3p23, 8q21.13, 8q22.1, 8q22.2, 8q24.11, 10q22.3, 16q24.3, 17q11.2, 17q12, 17q21.1, 17q22.2, 17q25.3, 19q13.12, and 20q13.2.

4. The composition of claim 1 wherein the different probe sets in total selectively hybridize to at least 20q13.2 and 3p23.

5. The composition of claim 4 wherein different probe set in total selectively hybridize to at least three of the recited genomic regions, and wherein the different probe sets in total also selectively hybridize to at least 17q25.3.

6. The composition of claim 1 wherein the different probe sets in total selectively hybridize to at least 17q21.2 and 17q21.1.

7. The composition of claim 4 wherein different probe set in total selectively hybridize to at least three of the recited genomic regions, and wherein the different probe sets in total also selectively hybridize to at least 17q25.3.

8. A composition comprising a breast cancer biomarker consisting of between 2 and 42 different probe sets, wherein at least 40% of the different probe sets comprise one or more isolated polynucleotides that selectively hybridize to a nucleic acid according to formula 1, or its complement:
X1-X2-X3;
wherein X2 is selected from the group consisting of SEQ ID NOS: 18-65 or their complement, wherein X1 and X3 are independently 0-500 kB of human genomic nucleic acid flanking X2 in the human genome; and
wherein the different polynucleotide probe sets in total selectively hybridize to at least two non-overlapping nucleic acids according to formula 1.

9. The composition of claim 8 wherein the different polynucleotide probe sets in total selectively hybridize to at least three non-overlapping nucleic acids according to formula 1.

10. The composition of claim 8 wherein at least 50% of the different probe sets comprise one or more isolated polynucleotides that selectively hybridize to a nucleic acid according to formula 1.

11. The composition of claim 8 wherein the different probe sets in total selectively hybridize to at least the following:
(a) one or more of SEQ ID NO:62-65, or complements thereof; and
(b) one or more of SEQ ID NO:44-46, or complements thereof.

12. The composition of claim 11 wherein the different probe set in total selectively hybridize to at least three of the recited genomic regions, and wherein the different probe sets in total also selectively hybridize to at least three non-overlapping nucleic acids according to formula 1, and wherein the different probe sets in total also selectively hybridize to at least one or more of SEQ ID NO:41-43, or complements thereof.

13. The composition of claim 11 wherein the different probe sets in total selectively hybridize to at least the following:
(c) one or more of SEQ ID NOS: 256-327, or complements thereof; and
(d) one or more of SEQ ID NOS: 160-255, or complements thereof.

14. The composition of claim 12 wherein the different probe sets in total also selectively hybridize to at least one or more of SEQ ID NOS:416-511, or complements thereof.

15. The composition of claim 8 wherein the different probe sets in total selectively hybridize to at least the following:
(a) one or more of SEQ ID NO:57-59, or complements thereof; and
(b) SEQ ID NO:40, or its complement.

16. The composition of claim 15 wherein the different probe set in total selectively hybridize to at least three of the recited genomic regions, and wherein the different probe sets in total also selectively hybridize to at least three non-overlapping nucleic acids according to formula 1, and wherein the different probe sets in total also selectively hybridize to at least one or more of SEQ ID NO:41-43, or complements thereof.

17. The composition of claim 15 wherein the different probe sets in total selectively hybridize to at least the following:
(c) SEQ ID NOS:328-415, or complements thereof; and
(d) SEQ ID NOS:66-159, or complements thereof.

18. The composition of claim 16 wherein the different probe sets in total also selectively hybridize to at least one or more of SEQ ID NOS:416-511, or complements thereof.

19. A composition comprising a breast cancer biomarker consisting of between 2 and 42 different probe sets, wherein at least 40% of the different probe sets comprise or consist of one or more isolated polynucleotides that selectively hybridize to a nucleic acid according to one of SEQ ID NO: 1-17 or complements thereof; wherein the different probe sets in total selectively hybridize to at least two of the recited nucleic acids according to SEQ ID NO:1-17 or complements thereof.

20. The composition of claim 19 wherein the different polynucleotide probe sets in total selectively hybridize to at least three of the recited nucleic acids according to SEQ ID NO: 1-17 or complements thereof.

21. The composition of claim 19 wherein at least 50% of the different probe sets comprise one or more isolated polynucleotides that selectively hybridize to a nucleic acid according to one of SEQ ID NO: 1-17 or complements thereof.

22. The composition of claim 19 wherein the different probe sets in total selectively hybridize to at least the following:
(a) SEQ ID NO: 17, or its complement; and
(b) SEQ ID NO:10, or its complement.

23. The composition of claim 22, wherein the different probe sets in total selectively hybridize to at least three of the recited nucleic acids according to SEQ ID NO: 1-17 or complements thereof, and wherein the different probe sets in total also selectively hybridize to at least SEQ ID NO:9, or its complement.

24. The composition of claim 19 wherein the different probe sets in total selectively hybridize to at least the following:
(a) SEQ ID NO:15, or its complement; and
(b) SEQ ID NO:8, or its complement.

25. The composition of claim 24, wherein the different probe sets in total selectively hybridize to at least three of the recited nucleic acids according to SEQ ID NO: 1-17 or complements thereof, and wherein the different probe sets in total also selectively hybridize to at least SEQ ID NO:9, or its complement.

26. A method for classifying a breast tumor, comprising
(a) contacting a nucleic acid sample obtained from a subject having a breast tumor with a composition comprising a breast cancer biomarker according to the present invention that, in total, selectively hybridize to two or more genomic regions selected from the group consisting of 3p23, 8q21.13, 8q22.1, 8q22.2, 8q24.11, 10q22.3, 16q24.3, 17q11.2, 17q12, 17q21.1, 17q22.2, 17q25.3, 19q13.12, and 20q13.2; wherein the contacting occurs under conditions to promote selective hybridization of the polynucleotides of the probe set to the two or more genomic regions;
(b) detecting formation of hybridization complexes;
(c) determining from the detected hybridization complexes whether one or more of the genomic regions are present in an altered copy number in the nucleic acid sample; and
(d) correlating an altered copy number of two or more of the genomic regions with an increased risk for breast cancer recurrence.

27. A method for classifying a breast tumor, comprising
(a) contacting a nucleic acid sample obtained from a subject having a breast tumor with the composition according to claim 8; wherein the contacting occurs under conditions to promote selective hybridization of the polynucleotides of the probe set to a target in the nucleic acid sample;
(b) detecting formation of hybridization complexes;
(c) determining from the detected hybridization complexes whether two or more markers selected from the group consisting of SEQ ID NOS: 18-65, or complements thereof, are present at an altered copy number in the nucleic acid sample; and
(d) correlating an altered copy number of two or more markers selected from the group consisting of SEQ ID NOS: 18-65, or complements thereof with an increased risk for breast cancer recurrence.

28. The method of claim 27 wherein the determining comprises determining from the detected hybridization complexes whether three or more markers selected from the group consisting of SEQ ID NOS: 18-65, or complements thereof, are present at an altered copy number in the nucleic acid sample, and the correlating comprises correlating an altered copy number of three or more markers selected from the group consisting of SEQ ID NOS: 18-65, or complements thereof with an increased risk for breast cancer recurrence.

29. The method of claim 27 wherein the different probe sets in total selectively hybridize to at least the following:
(e) one or more of SEQ ID NO:62-65, or complements thereof; and
(f) one or more of SEQ ID NO:44-46, or complements thereof;
and wherein the determining comprises determining from the detected hybridization complexes whether nucleic acids recited in (e) and (f), or complements thereof are present at an altered copy number in the nucleic acid sample, and wherein the correlating comprises correlating an increased copy number of the nucleic acids recited in (e) and (f), or complements thereof with an increased risk for breast cancer recurrence in a hormone receptor positive subject.

30. The method of claim 27 wherein the different probe sets in total selectively hybridize to at least the following:
(e) one or more of SEQ ID NO:62-65, or complements thereof;
(f) one or more of SEQ ID NO:44-46, or complements thereof; and
(g) one or more of SEQ ID NO:41-43, or complements thereof;
and wherein the determining comprises determining from the detected hybridization complexes whether nucleic acids recited in (e), (f), and (g) or complements thereof are present at an increased copy number in the nucleic acid sample, and wherein the correlating comprises correlating an increased copy number of the nucleic acids recited in (e), (f), and (g) or complements thereof with a high risk for breast cancer recurrence in a hormone receptor positive subject.

31. The method of claim 27 wherein the different probe sets in total selectively hybridize to at least the following:
(e) one or more of SEQ ID NO:57-59, or complements thereof; and
(f) one or more of SEQ ID NO:40, or its complement;
and wherein the determining comprises determining from the detected hybridization complexes whether nucleic acids recited in (e) and (f), or complements thereof are present at an increased copy number in the nucleic acid sample, and wherein the correlating comprises correlating an increased copy number of the nucleic acids recited in (e) and (f), or complements thereof with a high risk for breast cancer recurrence in a hormone receptor negative subject.

32. The method of claim 27 wherein the different probe sets in total selectively hybridize to at least the following:
(e) one or more of SEQ ID NO:57-59, or complements thereof;
(f) one or more of SEQ ID NO:40, or its complement; and
(g) one or more of SEQ ID NO:41-43, or complements thereof;
and wherein the determining comprises determining from the detected hybridization complexes whether nucleic acids recited in (e), (f), and (g) or complements thereof are present at an increased copy number in the nucleic acid sample, and wherein the correlating comprises correlating an increased copy number of the nucleic acids recited in (e), (f), and (g) or complements thereof with a high risk for breast cancer recurrence in a hormone receptor negative subject.

33. A method for making a treatment decision for a breast cancer patient, comprising carrying out the method for classifying a breast tumor according to claim 26, and then weighing the results in determining a course of treatment based on the risk of recurrence of the breast cancer in the subject.

The application's sequence listing, which the Patent Office published only in electronic form, follows.

SEQUENCE LISTING (511 sequences)

SEQ ID NO: 1 - DNA, 2596 bp, Homo sapiens
gatgtcacctgctttatttctggctttggcctgtggtctgtgatacccatcctgcttgatgttctgcagaatggcacttgactgctgggcatgcatgaagttaagggcaagaaacagtatgccatgtgttctgtaccatcatgtgtctcttcttgcttctgggcccttctactggtgaactttcatcaagatctgcgccatgccgtgtcactatcaagccattaagttttgtctgggttgctgtcagccccagttggcttcctggtcaacaaggacctcaagaactgcctgtggaccgaggccccctaccagtgcatgagacacacacctaccctccccagctttccaggaaccctactggctgccagactgatgggcgggctggtatgtgtggacatgtgttcactgtcattatgctgtggctccaggtgagggtgaggactgggcctatatagaatccagataccattgtcaacttcccttattcccgtctaagatgtgagcagagtgccatagtaggggttctgggaagaggtatttctgatttgtgggcctctgcttgcttgacttcaggtcacttatacttcttattttgcttgcctgccttcatccctcatttcctccctctcattcttctttcctccctccctttcctggtagcctcctttcctccccttctgccttccccttccttctttccttattcttttttattttgtttaaatagtaccacagagaaaacaactgaaaaaccacatttttctacatacagctggggaggtagctgagaacttggcactgcgcacacatactaggttgaaagagagttgaggaaaccagaaggccaagtggatctgctggcaaaccctgaacctgtctcctgcgcttgctctacagttctgaagttgaaaatcgttttcatgcctagcatctgcttgagttataaaccccaaggcagccatgtcatagactagtgtttactcttgttttgactttgttttaatgcttcctaagacccaagtgcctcctgctgtttcctcctttgtggtagcctctggccatctggacctcaatccccagctttcccactttcagcagtcctttgctctctttgcttctacctcaaatagccccaggagtgggctttagtctccaatatggagcatctcaagcttctcctgggggatggggattgggatgggcggaatctgttttggatctccgggttatttccagtgggtgtaaaagcagagctgggcctttccctctcttatccctgagggtgggtaagaaggactgtatctacacctgttcttccctaccttctcttttgttagggaggcctcattctaagttcctcaagagagtccttggcttaaagctgtagcaagggtgtgctaggtgggggatttggagcaaaaccgtcgagtaggcatgatactggtatggagtgggcctgcaaaatcagacagaaatggcttgagaagccgcagggggagcatgcctgtctctcagtgatagagtatgggagggacctccctagcttggaaaatgagaattgaaggggttatgaacaaataggatgcctagttgaggatgttcccaaagttttgtccaatcttatcattagtagattttataagccacagagacaaaccagaaacggaataatgttactttggatgctttatttttttgttctaggtgtggctttgtacatgcagaagaatgctatatgctgcacattttgcctttaaagtcttacgactttccccattttagtctaatgggaagatacagatgtgcaagtctgcttttttgttttttgttattatttttttttttgctctgtgttatggacattttcagacatgcacagaagtggagaggatggtccttggaccccatgtgtccatcacctagctgcatcacttatcagctatggtcaacctggtttcatctgtatctctctcttttcacctgtattgtttattgaaaatccaagacactatgccaatgcaaccgtgactactttgggagattggtagtctcttttgatggtgatagtgatggggtgcactatcataatcacatcaggtctgctttttgcttttaatgttaactaatgaagttccagagatgggccttagaaatgtgttttaagaattaacaaggagtctcaaaaagaaatgagagggatgcttcctttcccttgcatctacaaaacaagagagagactgttctgttgtaaaactctttcaaaaattctgatatggtaaggtacttgagacccttcaccagaatgtcaatctttttttctgtgtaacatggaaacttgtgtgaccattagcattgttatcagcttgtactggtctcataactctggttttggaagaataatttggaaattgttgctgtgttctgtgaaaataacctccccaaaataattagtaactggttgttctacttggtaatttgacaccctgttaataacgcaattatttctgtgttcttaaacagtataaatagttgtaagtttgcatgcatgatggaaaaataaaaacctgtatctctgtcaaaaaaaaaaaaaaaaaaa

SEQ ID NO: 2 - DNA, 2820 bp, Homo sapiens
ccgcggagttacgggaaagttggtccgagttcccagagtttccctctgtggtgccctaggcttcggcccggtgccccggctcctttcctcctttcggccttcgccgtccaccaggtccctctctctgtcccggccgccatggagcagccgccggcgcctaagagtaaactaaaaaagctgagtgaagacagtttgactaagcagcctgaagaagtttttgatgtattagagaagcttggagaagggtcttatggaagtgtatttaaagcaatacacaaggaatccggtcaagttgtcgcaattaaacaagtacctgttgaatcagatcttcaggaaataatcaaagaaatttccataatgcagcaatgtgacagcccatatgttgtaaagtactatggcagttattttaagaatacagacctctggattgttatggagtactgtggcgctggctctgtctcagacataattagattacgaaacaagacattaatagaagatgaaattgcaaccattcttaaatctacattgaaaggactagaatatttgcactttatgagaaaaatacacagagatataaaagctggaaatattctcctcaatacagaaggacatgcaaaattggcagattttggagtggctggtcagttaacagatacaatggcaaaacgcaatactgtaataggaactccattttggatggctcctgaggtgattcaagaaataggctataactgtgtggccgacatctggtcccttggcattacttctatagaaatggctgaaggaaaacctccttatgctgatatacatccaatgagggctatttttatgattcccacaaatccaccaccaacattcagaaagccagaactttggtccgatgatttcaccgattttgttaaaaagtgtttggtgaagaatcctgagcagagagctactgcaacacaacttttacagcatccttttatcaagaatgccaaacctgtatcaatattaagagacctgatcacagaagctatggagatcaaagctaaaagacatgacgaacagcaacgagaattggaagaggaagaagaaaattcggatgaagatgagctggattcccacaccatggtgaagactagtgtgggagagtgtggcaccatgcgggccacaagcacgatgagtgaaggggcccagaccatgattgaacataatagcacgatgttggaatccgacttggggaccatggtgataaacagtgaggatgaggaagaagaagatggaactatgaaaagaaatgcaacctcaccacaagtacaaagaccatctttcatggactactttgataagcaagacttcaagaataagagtcacgaaaactgtaatcagaacatgcatgaacccttccctatgtccaaaaacgtttttcctgataactggaaagttcctcaagatggagactttgactttttgaaaaatctaagtttagaagaactacagatgcggttaaaagcactggaccccatgatggaacgggagatagaagaacttcgtcagagatacactgcgaaaagacagcccattctggatgcgatggatgcaaagaaaagaaggcagcaaaacttttgagtctaatttcctctctgtttttaactattctggagaccaagaaaccactaggaattgaaggaatatttggatatttttaatcctaagattttgccctacaattaggcagaggtcaaaaagtgacaatggtacatgcccaggtaaattcccaaaaggcagaattgacagttgtatctgctgtgcattcactctaagatgaggagaacaaaagaagtgtattctcttgttctgtcagctgcataccagtaataaaactgttatgaaatggattttcaaggtctctaaaccttgaaaatccaaaggctattgttgcattgtacagcactgaaagggctttatgttacaatattctttattcctatctagtatactaggctatttattgtccccttaggtaaacttatttatttatgctattttggctttgtttcattttttaaggacaagatcaggatagctttggtgaaggtagggtcatattaatatgatgataatgtgcaaccaatttatactttctgcagggagctatggggtacattccttgatttccaggatagtttttcaaataggaaagcaataatggcagtagttctcaaatgggctaggccttttttatattgaagcaataattccatttttaccctttgaaattttgtttttttgatttttgatgtttggtacaaatagaactatatatatttaggtaaaatagatctatcgtgtttaaaaccaaagaaatcaatggaacccttgcacaaaaaagtgtgataaatatttttaaataaaaacttaatacaaatgtaatttgttaatattgtttcatgttttatgtgtagatctaatagctgaactgattcaaactgtaataagctcatcaatttcatttctatgaaaatgtgctctgttgtcacaggatgtttctgttgattttattcatttcctgggaattggtaaacatcatgttcctgatgataacccagtagcaaaaacatttgtactgagtggtacaagccttggggactgaaaaaaaaaaaagattaaaaccattaaaaagaaactcatttttacgctgaatgaacatttatatgattgcattgggaccagtcatttcctaagctacatatggccatcttgacagtgttttttcttttgtgtgtttaattattatgtgtaaatcataaagacaaataaatttcactgtgccac

SEQ ID NO: 3 - DNA, 3376 bp, Homo sapiens
ggcgaccgaacgcggcggtcggcagcgttcgcgcgggggcctgcgaagcgctgctcggggccggcactgcccgcggggaggacgcgccgccgccgccacccagcgccgccgccgccgccgcctccagccgggccgccgcgcgtcccgggggccggccccgcgagcgcaggagtaaacaccgccggagtcttggagccgctgcagaagggaataaagagagatgcagggatttgtgaggttacggcgccccagctgcaagatgcactagccggctgaacccgggatcggctgacttgttggaaccggagtgctctgcacggagagtggtggatgagttgaagttgccttcccggggctcattttccacgctgccgagaggaatccgagaggcaaggcaatcacttcgtcttgccattgattgggtatcgggagctttttttttctcccctctctctttcttttcctccgtcttgttgcatgcaagaaaattacagtccgctgctcgcccgccctgggtgcgagatattcagccccgctctctcccgtgcattgtgcaacccaaagatgaaagaccgaaggggagaaagttaaagaaatcgcccacatgcgctggatcagtccacggcttggggaaaggcatccagagaaggtgggagcggagagtttgaagtctttacaggcgggaagatggcggactggagctgaaagtgttgattgggaaacttgggtgattcttgtgtttatttacaatcctcttgacccaggcaggacacatgcaggccaaaaaacgctatttcatcctgctctcagctggctcttgtctcgcccttttgttttatttcggaggcttgcagtttagggcatcgaggagccacagccggagagaagaacacagcggtaggaatggcttgcaccaccccagtccggatcatttctggccccgcttcccggacgctctgcgccccttcgttccttgggatcaattggaaaacgaggattccagcgtgcacatttccccccggcagaagcgagatgccaactccagcatctacaaaggcaagaagtgccgcatggagtcctgcttcgatttcaccctttgcaagaaaaacggcttcaaagtctacgtatacccacagcaaaaaggggagaaaatcgccgaaagttaccaaaacattctagcggccatcgagggctccaggttctacacctcggaccccagccaggcgtgcctctttgtcctgagtctggatactttagacagagaccagttgtcacctcagtatgtgcacaatttgagatccaaagtgcagagtctccacttgtggaacaatggtaggaatcatttaatttttaatttatattccggcacttggcctgactacaccgaggacgtggggtttgacatcggccaggcgatgctggccaaagccagcatcagtactgaaaacttccgacccaactttgatgtttctattcccctcttttctaaggatcatcccaggacaggaggggagagggggtttttgaagttcaacaccatccctcctctcaggaagtacatgctggtattcaaggggaagaggtacctgacagggataggatcagacaccaggaatgccttatatcacgtccataacggggaggacgttgtgctcctcaccacctgcaagcatggcaaagactggcaaaagcacaaggattctcgctgtgacagagacaacaccgagtatgagaagtatgattatcgggaaatgctgcacaatgccactttctgtctggttcctcgtggtcgcaggcttgggtccttcagattcctggaggctttgcaggctgcctgcgtccctgtgatgctcagcaatggatgggagttgccattctctgaagtgattaattggaaccaagctgccgtcataggcgatgagagattgttattacagattccttctacaatcaggtctattcatcaggataaaatcctagcacttagacagcagacacaattcttgtgggaggcttatttttcttcagttgagaagattgtattaactacactagagattattcaggacagaatattcaagcacatatcacgtaacagtttaatatggaacaaacatcctggaggattgttcgtactaccacagtattcatcttatctgggagattttccttactactatgctaatttaggtttaaagcccccctccaaattcactgcagtcatccatgcggtgacccccctggtctctcagtcccagccagtgttgaagcttctcgtggctgcagccaagtcccagtactgtgcccagatcatagttctatggaattgtgacaagcccctaccagccaaacaccgctggcctgccactgctgtgcctgtcgtcgtcattgaaggagagagcaaggttatgagcagccgttttctgccctacgacaacatcatcacagacgccgtgctcagccttgacgaggacacggtgctttcaacaacagaggtggatttcgccttcacagtgtggcagagcttccctgagaggattgtggggtaccccgcgcgcagccacttctgggataactctaaggagcggtggggatacacatcaaagtggacgaacgactactccatggtgttgacaggagctgctatttaccacaaatattatcactacctatactcccattacctgccagccagcctgaagaacatggtggaccaattggccaattgtgaggacattctcatgaacttcctggtgtctgctgtgacaaaattgcctccaatcaaagtgacccagaagaagcagtataaggagacaatgatgggacagacttctcgggcttcccgttgggctgaccctgaccactttgcccagcgacagagctgcatgaatacgtttgccagctggtttggctacatgccgctgatccactctcagatgaggctcgaccccgtcctctttaaagaccaggtctctattttgaggaagaaataccgagacattgagcgactttgaggaatccggctgagtgggggaggggaagcaagaagggatgggggtcaagctgctctctcttcccagtgcagatccactcatcagcagagccagattgtgccaactatccaaaaacttagatgagcagaatgacaaaaaaaaaaaggccaatgagaactcaactcctggctcctgggactgcaccagactgctccaaactcacctcactggcttctgtgtcccaagactaggttgtgtacagtttaattatggaacattaaataattatttttgaaatgattgctatgcaggtttaaacttttttaatgatcaaaactattaaaaaccagagttctttgtttaatcaaaaaaaaaaaaaaaaa

SEQ ID NO: 4 - DNA, 3647 bp, Homo sapiens
agtgaatcggaaaggaggcgccggctgtggcggcggcgggagctgctcggaagctacacctcgcaagggctcccccctttccccaccccctcccccgacccttttcccctccccgggccacccagcccgcccaactcccagcggagagcaaggttttcttctgttttcatagccagccagaacaatgttctacgcacattttgttctcagtaaaagagggcctctggccaaaatttggctagcggcccattgggataagaagctaaccaaagcccatgtgttcgagtgtaatttagagagcagcgtggagagtatcatctcaccaaaggtgaaaatggcattacggacatcaggacatctcttactgggagtagttcgaatctatcacaggaaagccaaataccttcttgcagactgtaatgaagcattcattaagataaagatggcttttcggccaggtgtggttgacctgcctgaggaaaatcgggaagcagcttataatgccattactttacctgaagaatttcatgactttgatcagccactgcctgacttagatgacatcgatgtggcccagcagttcagcttgaatcagagtagagtggaagagataaccatgagagaagaagttgggaacatcagtattttacaagaaaatgattttggtgattttggaatggatgatcgtgagataatgagagaaggcagtgcttttgaggatgacgacatgttagtaagcactactacttctaacctcctattagagtctgaacagagcaccagcaatctgaatgagaaaattaaccatttagaatatgaagatcaatataaggatgataattttggagaaggaaatgatggtggaatattagatgacaaacttattagtaataatgatggcggtatctttgatgatccccctgccctctctgaggcaggggtgatgttgccagagcagcctgcacatgacgatatggatgaggatgataatgtatcaatgggtgggcctgatagtcctgattcagtggatcccgttgaaccaatgccaaccatgactgatcaaacaacacttgttccaaatgaggaagaagcatttgcattggagcctattgatataactgttaaagaaacaaaagccaagaggaagaggaagctaattgttgacagtgtcaaagagttggatagcaagacaattagagcccaacttagtgattattcagatattgttactactttggatctggcaccgcccaccaagaaattgatgatgtggaaagagacaggaggagtagaaaaactgttttctttacctgctcagcctttgtggaataacagactactgaagctctttacacgctgtcttacaccgcttgtaccagaagaccttagaaaaaggaggaaaggaggagaggcagataatttggatgaattcctcaaagaatttgaaaatccagaggttcctagagaggaccagcaacagcagcatcagcagcgtgatgttatcgatgagcccattattgaagagccaagccgcctccaggagtcagtgatggaggccagcagaacaaacatagatgagtcagctatgcctccaccaccacctcagggagttaagcgaaaagctggacaaattgacccagagcctgtgatgcctcctcagcaggtagagcagatggaaataccacctgtagagcttcccccagaagaacctccaaatatctgtcagctaataccagagttagaacttctgccagaaaaagagaaggagaaagagaaggaaaaagaagatgatgaagaggaagaggatgaagatgcatcagggggcgatcaagatcaggaagaaagaagatggaacaaaaggactcagcagatgcttcatggtcttcagcgtgctcttgctaaaactggagctgaatctatcagtttgcttgagttatgtcgaaatacgaacagaaaacaagctgccgcaaagttctacagcttcttggttcttaaaaagcagcaagctattgagctgacacaggaagaaccgtacagtgacatcatcgcaacacctggaccaaggttccatattatataaggagctagaagcattatagctagtgtttgattcactagtgcttacaaattgcccccatgtgtaggggacacagaaccctttgagaaaacttagatttttgtctgtacaaagtctttgcctttttccttcttcatttttttccagtacattaaatttgtcaatttcatctttgagggaaactgattagatgggttgtgtttgtgttctgatggagaaaacagcaccccaaggactcagaagatgattttaacagttcagaacagatgtgtgcaatattggtgcatgtaataatgttgagtggcagtcaaaagtcatgatttttatcttagttcttcattactgcattgaaaaggaaaacctgtctgagaaaatgcctgacagtttaatttaaaactatggtgtaagtctttgacaagaaaaaaaaacaaacaaacacttctttccatcagtaacactggcaatcttcctgttaaccactctccttagggatggtatctgaaacaacaatggtcaccctcttgagattcgttttaagtgtaattccataatgagcagaggtgtacgcgaaattgtgttatgactgatagccttcagctacaaaaagataggactgacctggtttaaagtgttctattttgtaaatcattccatttgagtctttctgatgaacttggctatactgaaatctgttattttagtgaggctccaaaatgagcaaagctaggcctgattagagtagagtgactattaaaaaacataactttctaggagctataaatcaaagttttaaaaagatgtttggatatatttgagtattccgatcatgaaaacagaaattgccctgcctactacaaggacagactgatgggaaattatgcacctggtcaacttagcttttaagcagacgatgctgtaaaaactaacggcttctctgatatttattgtaagttttagtactgatctccttttccagtgctgcacactcctggtttggaactttaatagcgttgcaacgaaatcctatatccagtttcctgtaatttaattgaagaaaaatacatccaaataaagactttattattaacagaccagatagcatcagaaatcatgtgactgttatgattatcagaatatgtcttaactttttagggcaaagttaacactgaaagttctagcttaagtgttgaaacttttgtgggaaaaaaaaatcacttttgaaactcagacttcagtgtatacccaataatttaaaattatgtgaaatgttttaaatttgtgaactcgtaattactgttttaatgattcagtttcttcagagtggtaattgtataaaattgctattgcagctttatattcaatatgatgtgcctgtaaaccaaggagttttccccgtttgtaaaaagacattgtagataattgaatgtttgattttagaaaggtcattagtttcttgttacacattttgttagtctggtttttgttgcttatcgggtttaatattgttcttgaaaatagttgatgctatgttatgtataacttttctaataaaagttgtgttataagctgt

SEQ ID NO: 5 - DNA, 2486 bp, Homo sapiens
gcactgcctctggcacctggggcagccgcgcccgcggagttttccgcccggcgctgacggctgctgcgcccgcggctccccagtgccccgagtgccccgcgggccccgcgagcgggagtgggacccagcccctaggcagaacccaggcgccgcgcccgggacgcccgcggagagagccactcccgcccacgtcccatttcgcccctcgcgtccggagtccccgtggccagatctaaccatgagctaccctggctatcccccgcccccaggtggctacccaccagctgcaccaggtggtggtccctggggaggtgctgcctaccctcctccgcccagcatgccccccatcgggctggataacgtggccacctatgcggggcagttcaaccaggactatctctcgggaatggcggccaacatgtctgggacatttggaggagccaacatgcccaacctgtaccctggggcccctggggctggctacccaccagtgccccctggcggctttgggcagcccccctctgcccagcagcctgttcctccctatgggatgtatccacccccaggaggaaacccaccctccaggatgccctcatatccgccatacccaggggcccctgtgccgggccagcccatgccaccccccggacagcagcccccaggggcctaccctgggcagccaccagtgacctaccctggtcagcctccagtgccactccctgggcagcagcagccagtgccgagctacccaggatacccggggtctgggactgtcacccccgctgtgcccccaacccagtttggaagccgaggcaccatcactgatgctcccggctttgaccccctgcgagatgccgaggtcctgcggaaggccatgaaaggcttcgggacggatgagcaggccatcattgactgcctggggagtcgctccaacaagcagcggcagcagatcctactttccttcaagacggcttacggcaaggatttgatcaaagatctgaaatctgaactgtcaggaaactttgagaagacaatcttggctctgatgaagaccccagtcctctttgacatttatgagataaaggaagccatcaagggggttggcactgatgaagcctgcctgattgagatcctcgcttcccgcagcaatgagcacatccgagaattaaacagagcctacaaagcagaattcaaaaagaccctggaagaggccattcgaagcgacacatcagggcacttccagcggctcctcatctctctctctcagggaaaccgtgatgaaagcacaaacgtggacatgtcactcgcccagagagatgcccaggagctgtatgcggccggggagaaccgcctgggaacagacgagtccaagttcaatgcggttctgtgctcccggagccgggcccacctggtagcagttttcaatgagtaccagagaatgacaggccgggacattgagaagagcatctgccgggagatgtccggggacctggaggagggcatgctggccgtggtgaaatgtctcaagaataccccagccttctttgcggagaggctcaacaaggccatgaggggggcaggaacaaaggaccggaccctgattcgcatcatggtgtctcgcagcgagaccgacctcctggacatcagatcagagtataagcggatgtacggcaagtcgctgtaccacgacatctcgggagatacttcaggggattaccggaagattctgctgaagatctgtggtggcaatgactgaacagtgactggtggctcacttctgcccacctgccggcaacaccagtgccaggaaaaggccaaaagaatgtctgtttctaacaaatccacaaatagccccgagattcaccgtcctagagcttaggcctgtcttccacccctcctgacccgtatagtgtgccacaggacctgggtcggtctagaactctctcaggatgccttttctaccccatccctcacagcctcttgctgctaaaatagatgtttcatttttctgactcatgcaatcattcccctttgcctgtggctaagacttggcttcatttcgtcatgtaattgtatatttttatttggaggcatattttcttttcttacagtcattgccagacagaggcatacaagtctgtttgctgcatacacatttctggtgagggcgactgggtgggtgaagcaccgtgtcctcgctgaggagagaaagggaggcgtgcctgagaaggtagcctgtgcatctggtgagtgtgtcacgagctttgttactgccaaactcactcctttttagaaaaaacaaaaaaaaagggccagaaagtcattccttccatcttccttgcagaaaccacgagaacaaagccagttccctgtcagtgacagggcttcttgtaatttgtggtatgtgccttaaacctgaatgtctgtagccaaaacttgtttccacattaagagtcagccagctctggaatggtctggaaatgtca

SEQ ID NO: 6 - DNA, 5503 bp, Homo sapiens
agccgccgccggggctgtaggcgccaaggccatgtccgactcgtgggtcccgaactccgcctcgggccaggacccagggggccgccggagggcctgggccgagctgctggcgggaagggtcaagagggaaaaatataatcctgaaagggcacagaaattaaaggaatcagctgtgcgcctcctgcgaagccatcaggacctgaatgcccttttgcttgaggtagaaggtccactgtgtaaaaaattgtctctcagcaaagtgattgactgtgacagttctgaggcctatgctaatcattctagttcatttataggctctgctttgcaggatcaagcctcaaggctgggggttcccgtgggtattctctcagccgggatggttgcctctagcgtgggacagatctgcacggctccagcggagaccagtcaccctgtgctgctgactgtggagcagagaaagaagctgtcttccctgttagagtttgctcagtatttattggcacacagtatgttctcccgtctttccttctgtcaagaattatggaaaatacagagttctttgttgcttgaagcggtgtggcatcttcacgtacaaggcattgtgagcctgcaagagctgctggaaagccatcccgacatgcatgctgtgggatcgtggctcttcaggaatctgtgctgcctttgtgaacagatggaagcatcctgccagcatgctgacgtcgccagggccatgctttctgattttgttcaaatgtttgttttgaggggatttcagaaaaactcagatctgagaagaactgtggagcctgaaaaaatgccgcaggtcacggttgatgtactgcagagaatgctgatttttgcacttgacgctttggctgctggagtacaggaggagtcctccactcacaagatcgtgaggtgctggttcggagtgttcagtggacacacgcttggcagtgtaatttccacagatcctctgaagaggttcttcagtcataccctgactcagatactcactcacagccctgtgctgaaagcatctgatgctgttcagatgcagagagagtggagctttgcgcggacacaccctctgctcacctcactgtaccgcaggctctttgtgatgctgagtgcagaggagttggttggccatttgcaagaagttctggaaacgcaggaggttcactggcagagagtgctctcctttgtgtctgccctggttgtctgctttccagaagcgcagcagctgcttgaagactgggtggcgcgtttgatggcccaggcattcgagagctgccagctggacagcatggtcactgcgttcctggttgtgcgccaggcagcactggagggcccctctgcgttcctgtcatatgcagactggttcaaggcctcctttgggagcacacgaggctaccatggctgcagcaagaaggccctggtcttcctgtttacgttcttgtcagaactcgtgccttttgagtctccccggtacctgcaggtgcacattctccacccacccctggttcccagcaagtaccgctccctcctcacagactacatctcattggccaagacacggctggccgacctcaaggtttctatagaaaacatgggactctacgaggatttgtcatcagctggggacattactgagccccacagccaagctcttcaggatgttgaaaaggccatcatggtgtttgagcatacggggaacatcccagtcaccgtcatggaggccagcatattcaggaggccttactacgtgtcccacttcctccccgccctgctcacacctcgagtgctccccaaagtccctgactcccgtgtggcgtttatagagtctctgaagagagcagataaaatccccccatctctgtactccacctactgccaggcctgctctgctgctgaagagaagccagaagatgcagccctgggagtgagggcagaacccaactctgctgaggagcccctgggacagctcacagctgcactgggagagctgagagcctccatgacagaccccagccagcgtgatgttatatcggcacaggtggcagtgatttctgaaagactgagggctgtcctgggccacaatgaggatgacagcagcgttgagatatcaaagattcagctcagcatcaacacgccgagactggagccacgggaacacattgctgtggacctcctgctgacgtctttctgtcagaacctgatggctgcctccagtgtcgctcccccggagaggcagggtccctgggctgccctcttcgtgaggaccatgtgtggacgtgtgctccctgcagtgctcacccggctctgccagctgctccgtcaccagggcccgagcctgagtgccccacatgtgctggggttggctgccctggccgtgcacctgggtgagtccaggtctgcgctcccagaggtggatgtgggtcctcctgcacctggtgctggccttcctgtccctgcgctctttgacagcctcctgacctgtaggacgagggattccttgttcttctgcctgaaattttgtacagcagcaatttcttactctctctgcaagttttcttcccagtcacgagatactttgtgcagctgcttatctccaggccttattaaaaagtttcagttcctcatgttcagattgttctcagaggcccgacagcctctttctgaggaggacgtagccagcctttcctggagacccttgcaccttccttctgcagactggcagagagctgccctctctctctggacacacagaaccttccgagaggtgttgaaagaggaagatgttcacttaacttaccaagactggttacacctggagctggaaattcaacctgaagctgatgctctttcagatactgaacggcaggacttccaccagtgggcgatccatgagcactttctccctgagtcctcggcttcagggggctgtgacggagacctgcaggctgcgtgtaccattcttgtcaacgcactgatggatttccaccaaagctcaaggagttatgaccactcagaaaattctgatttggtctttggtggccgcacaggaaatgaggatattatttccagattgcaggagatggtagctgacctggagctgcagcaagacctcatagtgcctctcggccacaccccttcccaggagcacttcctctttgagattttccgcagacggctccaggctctgacaagcgggtggagcgtggctgccagccttcagagacagagggagctgctaatgtacaaacggatcctcctccgcctgccttcgtctgtcctctgcggcagcagcttccaggcagaacagcccatcactgccagatgcgagcagttcttccacttggtcaactctgagatgagaaacttctgctcccacggaggtgccctgacacaggacatcactgcccacttcttcaggggcctcctgaacgcctgtctgcggagcagagacccctccctgatggtcgacttcatactggccaagtgccagacgaaatgccccttaattttgacctctgctctggtgtggtggccgagcctggagcctgtgctgctctgccggtggaggagacactgccagagcccgctgccccgggaactgcagaagctacaagaaggccggcagtttgccagcgatttcctctcccctgaggctgcctccccagcacccaacccggactggctctcagctgctgcactgcactttgcgattcaacaagtcagggaagaaaacatcaggaagcagctaaagaagctggactgcgagagagaggagctattggttttccttttcttcttctccttgatgggcctgctgtcgtcacatctgacctcaaatagcaccacagacctgccaaaggctttccacgtttgtgcagcaatcctcgagtgtttagagaagaggaagatatcctggctggcactctttcagttgacagagagtgacctcaggctggggcggctcctcctccgtgtggccccggatcagcacaccaggctgctgcctttcgctttttacagtcttctctcctacttccatgaagacgcggccatcagggaagaggccttcctgcatgttgctgtggacatgtacttgaagctggtccagctcttcgtggctggggatacaagcacagtttcacctccagctggcaggagcctggagctcaagggtcagggcaaccccgtggaactgataacaaaagctcgtctttttctgctgcagttaatacctcggtgcccgaaaaagagcttctcacacgtggcagagctgctggctgatcgtggggactgcgacccagaggtgagcgccgccctccagagcagacagcaggctgcccctgacgctgacctgtcccaggagcctcatctcttctgacgggacctgccactgcacaccagcccagctcccgtgtaaataatttattacaagcataacatggagctcttgttgcactaaaaagtggattacaaatctcctcgactgctttagtggggaaaggaatcaattatttatgaactgtccggccccgagtcactcagcgtttgcgggaaaataaaccactggtcccagagcagaggaaggctacttgagccggacaccaagcccgcctccagcaccaagggcgggcagcaccctccgaccctcccatgcgggtgcacacgaagggtgaggctgacacagccactgcggagtccaggctgctagaggtgctcatcctcactgccgtcctcaggtgggttcgggcttcaccgcctggccctctgtggtcacagaggggctcggtggcccaggtggtggttccgcctccaggggcagggccttgtcctgggtctgtgtcagcgggtgcaccatggacatgtgtacattgaggttgtgggccttctcaaaccgccggccacactggtcacaggcaaagtccagctcagtctcagccttgtgtttggtcatgtggtacttgagggatgcccgctgcctgcactggaacccacagacctcacacctgggggacagaggcagataagaaggtgcgaggccacagccctgggagggggtcctgactcacacttactgcaaaggcttggctcccgaatgtcgcatttggtggacgagaaggtgcttccgctgcttgaaggtttgtccacattcgtcacagatatagttccgcacctctgagaggggagagtccagtgagtccaggcccctgatgctccaacctcccggggggacgacgatgacaatgtgaaaccatcacagctgggaagacatttctgcacatggttcaccatgcagtgggcccaagcaaggggcctatgagggcctcgtttattaagatctttaaactgctttatacactgtcacgtggcttcatcagctgtgtgcatttcaggatggtttttaaagaaacctcagaaagctatttccttaaaaaaaaaaaaaaaaaaaaaaaaaaaaaaaaaaaaaaaaaaaaaaaaaaaaaaa

SEQ ID NO: 7 - DNA, 2622 bp, Homo sapiens
tctcccctcccgccgcccgggcgagcgacacggctgcggcccccctcccctcccttccctccctccctcccatccccccctccccgagacccaccggaccccgaacccagatggccgaaacgggctccccgtcttaacgatttggcgtctccctcgaccaccacctctttgtgcagcagcccccgggcagaccctgttccgagggcaacgctccccagtccccccacccccgaccccggaatcatgcatcggactacacggatcaaaatcacagagctgaacccccacctcatgtgtgccctctgcggggggtacttcatcgacgccaccactatcgtggagtgcctgcattccttctgcaaaacctgcatcgtgcgctacctggagaccaacaaatactgccccatgtgtgacgtgcaggtccataaaacccggccgctgctgagcatcaggtctgacaaaacacttcaagacattgtctacaaattggtccctgggctttttaaagatgagatgaaacggcggcgggatttctatgcagcgtaccccctgacggaggtccccaacggctccaatgaggaccgcggcgaggtcttggagcaggagaagggggctctgagtgatgatgagattgtcagcctctccatcgaattctacgaaggtgccagggaccgggacgagaagaagggccccctggagaatggggatggggacaaagagaaaacaggggtgcgcttcctgcgatgcccagcagccatgaccgtcatgcatcttgccaagtttctccgcaacaagatggatgtgcccagcaagtacaaggtggaggttctgtacgaggacgagccactgaaggaatactacaccctcatggacatcgcctacatctacccctggcggcggaacgggcctctccccctcaagtaccgtgtccagccagcctgcaagcggctcaccctagccacggtgcccaccccctccgagggcaccaacaccagcggggcgtccgagtgtgagtcagtcagcgacaaggctcccagccctgccaccctgccagccacctcctcctccctgcccagcccagccaccccatcccatggctctcccagttcccatgggcctccagccacccaccctacctcccccactcccccttcgacagccagtggggccaccacagctgccaacgggggtagcttgaactgcctgcagacaccatcctccaccagcagggggcgcaagatgactgtcaacggcgctcccgtgccccccttaacttgaggccagggaccctctcccttcttccagccaagcctctccactccttccactttttctgggcccttttttccacctcttctactttccccagctcttcccaccttgggggtggggggcgggttttataaataaatatatatatatatgtacataggaaaaaccaaatatacatacttattttctatggaccaaccagattaatttaaatgccacaggaaacaaactttatgtgtgtgtgtatgtgtggaaaatggtgttcattttttttggggggggtcttgtgtaatttgctgtttttgggggtgcctggagatgaactggatgggccactggagtctcaataaagctctgcaccatcctcgctgtttcccaaggcaggtggtgtgttgggggccccttcagacccaaagctttaggcatgattccaactggctgcatataggagtcagttagaatcgtttctttctctccccgtttctctccccatcttggctgctgtcctgcctctgaccagtggccgccccccacgttgttgaatgtccagaaattgctaagaacagtgccttttacaaatgcagtttatccctggttctgaggagcaagtgcagggtggaggtggcacctgcatcacctcctcctcttgcagtggaaactttgtgcaaagaatagatagttctgcctctttttttttttttcctgtgtgtgtggcctttgcatcatttatcttgtggaaaagaagattcaggccctgagaggtctcagctcttggaggagggctaaggctttagcattgtgaagcgctgcacccccaccaaccttaccctcaccggggaaccctcactagcaggactggtggtggagtctcacctggggcctagagtggaagtgggggtgggttaacctcacacaagcacagatcccagactttgccagaggcaaacagccttccaattgcccctccacccccagctgaggcccggtcacctggtcaggacagagcaactgcatctaaaagcacaagaagacagaaacctgtaagctctgaccccacccccaccccttgagaggtcagcggaccacctccttagggacagaccctggcaggtcgctgcccaccgagatttcctcaagtgtgcatagatctgagaggagtcgggagtcgagactcgagattccatcatagcgtaggtgtgtggggttgggagccccctgatgggcttgtctgtgtttgcaccttgtcctgtgtctgaggtcctgtgactgtaccctcctttgccctgggacatctgtatctcttggctttgtaataaatgctgcatactttctaaaaaaaaaaaaaaaaaa

SEQ ID NO: 8 - DNA, 2425 bp, Homo sapiens
gctccggacgcgaggggcggggcgagcgcgggacaaagggaagcgaagccggagctgcgggcgctttttctgcccgcggtgtctcagattcattcttaaggaactgagaacttaatcttccaaaatgtcaaaaagaccatcttatgccccacctcccaccccagctcctgcaacacaaatgcccagcacaccagggtttgtgggatacaatccatacagtcatctcgcctacaacaactacaggctgggagggaacccgggcaccaacagccgggtcacggcatcctctggtatcacgattccaaaacccccaaagccaccagataagccgctgatgccctacatgaggtacagcagaaaggtctgggaccaagtaaaggcttccaaccctgacctaaagttgtgggagattggcaagattattggtggcatgtggcgagatctcactgatgaagaaaaacaagaatatttaaacgaatacgaagcagaaaagatagagtacaatgaatctatgaaggcctatcataattcccccgcgtaccttgcttacataaatgcaaaaagtcgtgcagaagctgctttagaggaagaaagtcgacagagacaatctcgcatggagaaaggagaaccgtacatgagcattcagcctgctgaagatccagatgattatgatgatggcttttcaatgaagcatacagccaccgcccgtttccagagaaaccaccgcctcatcagtgaaattcttagtgagagtgtggtgccagacgttcggtcagttgtcacaacagctagaatgcaggtcctcaaacggcaggtccagtccttaatggttcatcagcgaaaactagaagctgaacttcttcaaatagaggaacgacaccaggagaagaagaggaaattcctggaaagcacagattcatttaacaatgaacttaaaaggttgtgcggtctgaaagtagaagtggatatggagaaaattgcagctgagattgcacaggcagaggaacaggcccgcaaaaggcaggaggaaagggagaaggaggccgcagagcaagctgagcgcagtcagagcagcatcgttcctgaggaagaacaagcagctaacaaaggcgaggagaagaaagacgacgagaacattccgatggagacagaggagacacaccttgaagaaacaacagagagccaacagaatggtgaagaaggcacgtctactcctgaggacaaggagagtgggcaggagggggtcgacagtatggcagaggaaggaaccagtgatagtaacactggctcggagagcaacagtgcaacagtggaggagccaccaacagatcccataccagaagatgagaaaaaagaataagtgttgccttgttttgtgtgttctaaatactttttttaatgaaaaaatgttttttggttttaatggtgttacgtggtttgtgtattaattttttttcttgtccatatcacaccaccaaaggcttttggaccatttagcatcatgagcctaatggctcagtcagtcacctttcttaagtgttgtgaagatggctcttttctttggatcttgtttctagccctcaactgctgaaagcctcagaatttagattaattgagaaaacacccacctcttttagagaattatcctttgatgctgcagaatctactcttacaatgccttcctacagctcactggggtgcttaccaaagccatagctttaaaccttcccagtccccatcagtagcttcctgaaagtctcctctcttgtttacttctgcaaagggtagcttcttaaaaacgtgatcatgtatgagtatgtatttgttcacttacccttttttacttttaatcaatgtcagataccaagagttgtgttaagctgagtgtagtgtgtaactaactacacttggatcttactgatccagaaatagtccccatagttagagtagttacttatgaagtggttattaaagtgaacacagcacatatacattatctatactgctttttgttatgattaatactgggtatgttctggtaaatccatccttattgtatagaaaaaaaattacttttttaccaggttttccaaagacagaatagatcacaaagctcaaggaatttaatattcttgtaatggactagataattcaaactgattagcccattccagaagaaaaacagctgggaattaagttaatccacttgaaattgttttacaataatcagaacatccaaacctcaaggctcaggatcccatagaccagagcccacctttttgataaacttagtaaagtcttggagactagaagcaagatagtttgtgacacataagcttcccaaaaactagaatagatttttactgaatagtggtatatctgatggtatatgtttcttaaaggtccaaatgtaataaaaaaaaaa

SEQ ID NO: 9 - DNA, 2655 bp, Homo sapiens
cccagaaggccgcggggggtggaccgcctaagagggcgtgcgctcccgacatgccccgcggcgcgccattaaccgccagatttgaatcgcgggacccgttggcagaggtggcggcggcggcatgggtgccccgacgttgccccctgcctggcagccctttctcaaggaccaccgcatctctacattcaagaactggcccttcttggagggctgcgcctgcaccccggagcggatggccgaggctggcttcatccactgccccactgagaacgagccagacttggcccagtgtttcttctgcttcaaggagctggaaggctgggagccagatgacgaccccatagaggaacataaaaagcattcgtccggttgcgctttcctttctgtcaagaagcagtttgaagaattaacccttggtgaatttttgaaactggacagagaaagagccaagaacaaaattgcaaaggaaaccaacaataagaagaaagaatttgaggaaactgcggagaaagtgcgccgtgccatcgagcagctggctgccatggattgaggcctctggccggagctgcctggtcccagagtggctgcaccacttccagggtttattccctggtgccaccagccttcctgtgggccccttagcaatgtcttaggaaaggagatcaacattttcaaattagatgtttcaactgtgctcttgttttgtcttgaaagtggcaccagaggtgcttctgcctgtgcagcgggtgctgctggtaacagtggctgcttctctctctctctctcttttttgggggctcatttttgctgttttgattcccgggcttaccaggtgagaagtgagggaggaagaaggcagtgtcccttttgctagagctgacagctttgttcgcgtgggcagagccttccacagtgaatgtgtctggacctcatgttgttgaggctgtcacagtcctgagtgtggacttggcaggtgcctgttgaatctgagctgcaggttccttatctgtcacacctgtgcctcctcagaggacagtttttttgttgttgtgtttttttgtttttttttttttggtagatgcatgacttgtgtgtgatgagagaatggagacagagtccctggctcctctactgtttaacaacatggctttcttattttgtttgaattgttaattcacagaatagcacaaactacaattaaaactaagcacaaagccattctaagtcattggggaaacggggtgaacttcaggtggatgaggagacagaatagagtgataggaagcgtctggcagatactccttttgccactgctgtgtgattagacaggcccagtgagccgcggggcacatgctggccgctcctccctcagaaaaaggcagtggcctaaatcctttttaaatgacttggctcgatgctgtgggggactggctgggctgctgcaggccgtgtgtctgtcagcccaaccttcacatctgtcacgttctccacacgggggagagacgcagtccgcccaggtccccgctttctttggaggcagcagctcccgcagggctgaagtctggcgtaagatgatggatttgattcgccctcctccctgtcatagagctgcagggtggattgttacagcttcgctggaaacctctggaggtcatctcggctgttcctgagaaataaaaagcctgtcatttcaaacactgctgtggaccctactgggtttttaaaatattgtcagtttttcatcgtcgtccctagcctgccaacagccatctgcccagacagccgcagtgaggatgagcgtcctggcagagacgcagttgtctctgggcgcttgccagagccacgaaccccagacctgtttgtatcatccgggctccttccgggcagaaacaactgaaaatgcacttcagacccacttatttctgccacatctgagtcggcctgagatagacttttccctctaaactgggagaatatcacagtggtttttgttagcagaaaatgcactccagcctctgtactcatctaagctgcttatttttgatatttgtgtcagtctgtaaatggatacttcactttaataactgttgcttagtaattggctttgtagagaagctggaaaaaaatggttttgtcttcaactcctttgcatgccaggcggtgatgtggatctcggcttctgtgagcctgtgctgtgggcagggctgagctggagccgcccctctcagcccgcctgccacggcctttccttaaaggccatccttaaaaccagaccctcatggctaccagcacctgaaagcttcctcgacatctgttaataaagccgtaggcccttgtctaagtgcaaccgcctagactttctttcagatacatgtccacatgtccatttttcaggttctctaagttggagtggagtctgggaagggttgtgaatgaggcttctgggctatgggtgaggttccaatggcaggttagagcccctcgggccaactgccatcctggaaagtagagacagcagtgcccgctgcccagaagagaccagcaagccaaactggagcccccattgcaggctgtcgccatgtggaaagagtaactcacaattgccaataaagtctcatgtggttttatctaaaaaaaaaaaaaaaaaaaaaaaaa

SEQ ID NO: 10 - DNA, 6448 bp, Homo sapiens
cctactcggagaaaacctactttatcttatttaaattagggtcctccaagcgatcttaacatctcctaagtcccaagcaccctgtttttttcctgatactttttccgtttaccttaaggtctgtgtcaacctgacagtaagctgcacgatggcaggggtcttgcctactaggttccctgtgcacagcagcccgtcaacagtagttgaataaacatcataggtcacaataaccctgggactgcctcttggggaggtagccgcaaactctcgcaggtggcagtgacaccagtacttctccggggggttgttcgagtggaggaatactcttacgtgaaagtgctcagtacaccactgcggcaggaaggaggaagggaagaattccagatggggagaaagtaatattttgcagcacagtacagggtaaactgggtccaggtgggcgtagccgccgcgacaccttcacgtgaccgcggacagcttaaggaccccgcatccagtgcgcctgcgctggagctcccggaagttgccggacccggaacgcaggcggagcgcaagtctgtcagccagtcagtccgccagtccgccagcccagtacctctctctcctcggccctcgtaagctgtccgcggtctgtttggcccgaacggcggcggaggcgctgatcatggcgacattcatctcggtgcagctgaaaaagacctcagaggtggacctggccaagccgctggtgaagttcatccagcagacttacccaagcggcggggaagagcaggcccagtactgccgcgcggcggaggagctcagcaagctgcgccgcgccgcagtcggtcgtccgctggacaagcacgagggcgcgctcgagacgctcctgagatattatgatcagatttgttctattgaacccaaattcccattttctgaaaatcagatctgcttgacatttacctggaaggatgctttcgataaaggttcactttttggaggctctgtaaaactggctcttgcaagcttaggatatgaaaagagctgtgtgttgttcaattgtgcagccttagctagccaaattgcagcagaacagaacctggataatgatgaaggattgaaaatcgctgctaaacattaccagtttgctagtggtgcctttttacatattaaagagacggttttatctgccttaagtcgagagccgaccgtggacatatctccagatactgttgggaccctcagtcttattatgctggcacaggctcaagaagtattttttttaaaagccacaagagataaaatgaaagatgccatcatagctaaattggctaatcaggctgcagattattttggtgatgctttcaaacagtgtcaatacaaagatactctccccaaggaggtgttccctgtcttggctgcaaagcactgtatcatgcaggccaatgctgagtaccatcagtctatcctggcaaaacagcagaagaaatttggagaagaaattgcaaggttacagcatgcagcagaactgattaaaacagtggcatctcgctatgatgaatatgttaatgtgaaggatttttctgacaaaatcaatcgtgcccttgctgcagcaaagaaggataatgacttcatttatcatgatcgagttccagaccttaaagatctagatcctattggcaaagccacacttgtgaaatctaccccggtcaatgtacccatcagtcagaaatttactgatctgtttgagaagatggttcccgtgtcagtacagcagtctttggctgcctataatcagaggaaagccgatttggttaacagatcaattgctcagatgagagaagccaccactttggcaaatggggtgctagcttcccttaatcttccagcagcaattgaagatgtgtctggagacactgtacctcagtctatattgactaaatccagatctgtgattgaacagggaggcatccagactgttgatcagttgattaaagaactgcctgaattactgcaacgaaatagagaaatcctagatgagtcattaaggttgttggatgaagaagaagcaaccgataatgatttaagagcaaaatttaaggaacgttggcaaaggacaccatccaatgaactgtataagcctttaagagcagagggaaccaacttcagaacagttttagataaagctgtgcaggcagatggacaagtgaaagaatgttaccagtctcatcgtgacaccatcgtgcttttgtgtaagccagagcctgagctgaatgctgccatcccttctgctaatccagcaaagaccatgcagggcagtgaggttgtaaatgtcttaaaatccttattgtcaaatcttgatgaagtaaagaaggaaagagagggtctggagaatgacttgaaatctgtgaattttgacatgacaagcaagtttttgacagccctggctcaagatggtgtgataaatgaagaagctctttctgttactgaactagatcgagtctatggaggtcttacaactaaagtccaagaatctctaaagaaacaggagggacttcttaaaaatattcaggtctcacatcaggaattttcaaaaatgaaacaatctaataatgaagctaacttaagagaagaagttttgaagaatttagctactgcatatgacaactttgttgaacttgtagctaatttgaaggaaggcacaaagttttacaatgagttgactgaaatcctggtcaggttccagaacaaatgcagtgatatagtttttgcacggaagacagaaagagatgaactcttaaaggacttgcaacaaagcattgccagagaacctagtgctccttcaattcctacacctgcgtatcagtcctcaccagcaggaggacatgcaccaactcctccaactccagcgccaagaaccatgccgcctactaagccccagcccccagccaggcctccaccacctgtgcttccagcaaatcgagctccttctgctactgctccatctccagtgggggctgggactgctgcgccagctccatcacaaacgcctggctcagctcctcctccacaggcgcagggaccaccctatcccacctatccaggatatcctgggtattgccaaatgcccatgcccatgggctataatccttatgcgtatggccagtataatatgccatatccaccagtgtatcaccagagtcctggacaggctccatacccgggaccccagcagccttcataccccttccctcagcccccacagcagtcttactatccacagcagtaatatgtctgctcagcagctcagctgattcagatcagagggaaagaaataccaaccctgcaataagtgtactaaactctacgctctggttaatgtaatgtactctcctggactgaatgcagtgtataatttctgtctacagctagaagctgtgccccagttccacatttgattacacatgtgagatttgctgctgttgcagtataaacactaggtataataggatttgaaattgcattacagttcataaaaattgaaaatgagaaattaaacctgcaagtgaaacatttgaaacgattatactttctacataagacatggttgggacatcagatacttacaaagatggtttaagtatggatactagagaaaattaagttttctttctctttggtttattgatttggtttaatttccattatgctattttgcataatcaaggcactgtaaatcttataattttaaaataaattacttaagaacagttgtcattgttatgttttgttattgattctcattactgtctaattttttttctggtattagtctcattttgtatgtatataagttaaacagatactgtttttaagtgcatgaatagtacaagttattatcaaggatgttttacagggaaatcaaaagaatattatcatactttatctttcgtatgctgattagtaaacgatttttgacatttattttagaaagtcctataatgtggaagaaacaaacagttgctaccaaagattcttcaaataaacatacaaataaatgtgtatatttaatgttttattgttagcttctccagaaaattgatgcaaattctggtaataattcttgcattttttccccataacctggttaaaataaatacgccattggcaatacttcataatgtaatggaattgtttggggaacacttactgtaccctctcatcctttttccaccttactgtgttaacttagtgacatttaatgcccaatatgtatgaatagatctaagccatttaattttttttccttaaagattggagtattttataattcaaggagcatacaaaacaatggttgggaacatatgccaattatggaataggctatgtatttaatattaatctctgccattaggatatctactcactgtataaacctcagtaaaaatagtgaagacatgcatcatggaatgagaaaatgagaaaggaatgagttgtctaacatcacagtgggatctgttttttgtgaggttcatttctgaacacattaggcatatgagcagatttccagtgaatctatttatgtttattttctgagtttcaacgctgaccttttcttgcattattgtttcattttaatgatagtgttacttgtcccactgttgttttcattgagtttggatttatattttaaatgttcgaatgaaagtatgattgtaaaagggagtgaattggtttaaaaatatatgtatattttaaactttgttgtgtgtaggaaacatgaaggcatgttaattcaatataaatgacctttgatttcatggaatattaaagttggtttaaagtccaatagttaaaccttagcaaaaatagctttttactttatcagttgctaagatttaatactttggattcatcaaagtgtgacatgggcttgtttgacttctgtaagtggcatttaagttccacattcttattacttgaggtactttatactaacataagacagtgagagttagaggtattacaagttgctagtttataatgtcttactaatgcagaaacaaggaaaaaagcaaaattggcctgaatattctcttggggaaagagggcaccaaagaaaagggtaagtgcatctgagggccaaaagagatgtataagccttttagcccattccccatgctgggcctgctcacagagccacaggaagatcattcagaaactaggaaaggaggcccccacagctgatcctgccacagcacacctgactcactcggctctgttagtgtaaccttttaaatgtagcaacacaaaccctttccctcttgtcagttcactcatcctttggtttctttttaatcacctgtgtctgggcacagacaatcacaataaatgcagccctttattactgttaaggatcatactgttggtttggagttggaagggtactactctgtgattcaggtgtgttgtacccatatttataattaggctttattatcttcctaaatcaaggaaaggaaatcatccccagaccatttatgctgagctttggaatactattttaaactggattgtacttaaataatgaagctctgcatagaggaactagtcagaagtggggaaaacactgtctaatttttatcagtctggtataaagtattgatctaagagaactctccctgtgccccttggtctttattctcaattaagaaaaacagtcacatgtcacgacaaaccaatcaatctttatgagatattcctgtatccataccccagcttgtttgcaatttataaacctccccttcaaaactaaggagttgcagaaaaaaatggatttcacagagccttgtgtccctaaagttctgtcccagtcagcagtctttatagtccaaacagattataaaaaatgttttccatttgaactttacagtttgcaaaagtgcttttatacattttctaatttcagaaacaggataatttgttaagtgggtttcagtttgctaatagggattttttgtgttttgttttttaattttcagcatctcttgaagaatcttgctacagccaaatggcatctcactttttaaagacgtttgcaattattagttgattcacagtacagaacaaggtataaaggaaaaaaccctgctaggtagtgttataattgctagattaaaaatagactagaacaggttcattttaagatttacttggaagagcaaagaaggaaaaattatatttttaaagaaagagaatattcaggctttatttctggtatgaagtttatattttttaaaaaaatcctatattatcacaccagagattttagattcttttctggttagaaacattgctggtagttggattatatttttattgtattcatttatcttagggggaacattgtaaagaaacaaaaaggtccagatgaatgtatgctagaaataaaagttgaaagattctt

SEQ ID NO: 11 - DNA, 2205 bp, Homo sapiens
cacagggctcccccccgcctctgacttctctgtccgaagtcgggacaccctcctaccacctgtagagaagcgggagtggatctgaaataaaatccaggaatctgggggttcctagacggagccagacttcggaacgggtgtcctgctactcctgctggggctcctccaggacaagggcacacaactggttccgttaagcccctctctcgctcagacgccatggagctggatctgtctccacctcatcttagcagctctccggaagacctttggccagcccctgggacccctcctgggactccccggccccctgatacccctctgcctgaggaggtaaagaggtcccagcctctcctcatcccaaccaccggcaggaaacttcgagaggaggagaggcgtgccacctccctcccctctatccccaaccccttccctgagctctgcagtcctccctcacagagcccaattctcgggggcccctccagtgcaagggggctgctcccccgcgatgccagccgcccccatgtagtaaaggtgtacagtgaggatggggcctgcaggtctgtggaggtggcagcaggtgccacagctcgccacgtgtgtgaaatgctggtgcagcgagctcacgccttgagcgacgagacctgggggctggtggagtgccacccccacctagcactggagcggggtttggaggaccacgagtccgtggtggaagtgcaggctgcctggcccgtgggcggagatagccgcttcgtcttccggaaaaacttcgccaagtacgaactgttcaagagctccccacactccctgttcccagaaaaaatggtctccagctgtctcgatgcacacactggtatatcccatgaagacctcatccagaacttcctgaatgctggcagctttcctgagatccagggctttctgcagctgcggggttcaggacggaagctttggaaacgctttttctgtttcttgcgccgatctggcctctattactccaccaagggcacctctaaggatccgaggcacctgcagtacgtggcagatgtgaacgagtccaacgtgtacgtggtgacgcagggccgcaagctctacgggatgcccactgacttcggtttctgtgtcaagcccaacaagcttcgaaatggacacaaggggcttcggatcttctgcagtgaagatgagcagagccgcacctgctggctggctgccttccgcctcttcaagtacggggtgcagctgtacaagaattaccagcaggcacagtctcgccatctgcatccatcttgtttgggctccccacccttgagaagtgcctcagataataccctggtggccatggacttctctggccatgctgggcgtgtcattgagaacccccgggaggctctgagtgtggccctggaggaggcccaggcctggaggaagaagacaaaccaccgcctcagcctgcccatgccagcctccggcacgagcctcagtgcagccatccaccgcacccaactctggttccacgggcgcatttcccgtgaggagagccagcggcttattggacagcagggcttggtagacggcctgttcctggtccgggagagtcagcggaacccccagggctttgtcctctctttgtgccacctgcagaaagtgaagcattatctcatcctgccgagcgaggaggagggtcgcctgtacttcagcatggatgatggccagacccgcttcactgacctgctgcagctcgtggagttccaccagctgaaccgcggcatcctgccgtgcttgctgcgccattgctgcacgcgggtggccctctgaccaggccgtggactggctcatgcctcagcccgccttcaggctgcccgccgcccctccacccatccagtggactctggggcgcggccacaggggacgggatgaggagcgggagggttccgccactccagttttctcctctgcttctttgcctccctcagatagaaaacagcccccactccagtccactcctgacccctctcctcaagggaaggccttgggtggccccctctccttctcctagctctggaggtgctgctctagggcagggaattatgggagaagtgggggcagcccaggcggtttcacgccccacactttgtacagaccgagaggccagttgatctgctctgttttatactagtgacaataaagattattttttgatac

SEQ ID NO: 12 - DNA, 2073 bp, Homo sapiens
ggcgctactgaggccgcggagccggactgcggttggggcgggaagagccggggccgtggctgacatggagcagccctgctgctgaggccgcgccctccccgccctgaggtgggggcccaccaggatgagcaagctgcccagggagctgacccgagacttggagcgcagcctgcctgccgtggcctccctgggctcctcactgtcccacagccagagcctctcctcgcacctccttccgccgcctgagaagcgaagggccatctctgatgtccgccgcaccttctgtctcttcgtcaccttcgacctgctcttcatctccctgctctggatcatcgaactgaataccaacacaggcatccgtaagaacttggagcaggagatcatccagtacaactttaaaacttccttcttcgacatctttgtcctggccttcttccgcttctctggactgctcctaggctatgccgtgctgcggctccggcactggtgggtgattgcggtcacgacgctggtgtccagtgcattcctcattgtcaaggtcatcctctctgagctgctcagcaaaggggcatttggctacctgctccccatcgtctcttttgtcctcgcctggttggagacctggttccttgacttcaaagtcctaccccaggaagctgaagaggagcgatggtatcttgccgcccaggttgctgttgcccgtggacccctgctgttctccggtgctctgtccgagggacagttctattcacccccagaatcctttgcagcgtctgacaatgaatcagatgaagaagttgctgggaagaaaagtttctctgctcaggagcgggagtacatccgccaggggaaggaggccacggcagtggtggaccagatcttggcccaggaagagaactggaagtttgagaagaataatgaatatggggacaccgtgtacaccattgaagttccctttcacggcaagacgtttatcctgaagaccttcctgccctgtcctgcggagctcgtgtaccaggaggtgatcctgcagcccgagaggatggtgctgtggaacaagacagtgactgcctgccagatcctgcagcgagtggaagacaacaccctcatctcctatgacgtgtctgcaggggctgcgggcggcgtggtctccccaagggacttcgtgaatgtccggcgcattgagcggcgcagggaccgatacttgtcatcagggatcgccacctcacacagtgccaagcccccgacgcacaaatatgtccggggagagaatggccctgggggcttcatcgtgctcaagtcggccagtaacccccgtgtttgcacctttgtctggattcttaatacagatctcaagggccgcctgccccggtacctcatccaccagagcctcgcggccaccatgtttgaatttgcctttcacctgcgacagcgcatcagcgagctgggggcccgggcgtgactgtgccccctcccaccctgcgggccagggtcctgtcgccaccacttccagagccagaaagggtgccagttgggctcgcactgcccacatgggacctggccccaggctgtcaccctccaccgagccacgcagtgcctggagttgactgactgagcaggctgtggggtggagcactggactccggggccccactggctggaggaagtggggtctggcctgttgatgtttacatggcgccctgcctcctggaggaccagattgctctgccccaccttgccagggcagggtctgggctgggcacctgacttggctggggaggaccagggccctgggcagggcagggcagcctgtcacccgtgtgaagatgaaggggctcttcatctgcctgcgctctcgtcggtttttttaggattattgaaagagtctgggacccttgttggggagtgggtggcaggtgggggtgggctgctggccatgaatctctgcctctcccaggctgtccccctcctcccagggcctcctgggggacctttgtattaagccaattaaaaacatgaatttaaaaaaaaaaaaaaaaaaaaaaaaaaaaaaaaaaaaaaaaaaaaaaaaaa

SEQ ID NO: 13 - DNA, 2349 bp, Homo sapiens
agcccctctacctccggaagagacgagtgcggtaacaccgttcacagagctagccggacgtcctccgactcaagatatttgtcaaatattttcagaagatggctgatccttggcaggaatgcatggattatgcagtaactctagcaagacaagctggagaggtagtttgtgaagctataaaaaatgaaatgaatgttatgctgaaaagttctccagttgatttggtaactgctacggaccaaaaagttgaaaaaatgcttatctcttccataaaggaaaagtatccatctcacagtttcattggtgaagaatctgtggcagctggggaaaaaagtatcttaaccgacaaccccacatggatcattgaccctattgatggaacaactaactttgtacatagatttccttttgtagctgtttcaattggctttgctgtaaataaaaagatagaatttggagttgtgtacagttgtgtggaaggcaagatgtacactgccagaaaaggaaaaggtgccttttgtaatggtcaaaaactacaagtttcacaacaagaagatattaccaaatctctcttggtgactgagttgggctcttccagaacaccagagactgtgagaatggttctttctaatatggaaaagcttttttgcattcctgttcatgggatccggagtgttggaacagcagctgttaatatgtgccttgtggcaactggcggagcagatgcatattatgaaatgggaattcactgctgggatgttgcaggagctggcattattgttactgaagctggtggcgtgctaatggatgttacaggtggaccatttgatttgatgtcacgaagagtaattgctgcaaataatagaatattagcagaaaggatagctaaagaaattcaggttatacctttgcaacgagacgacgaagattaattaaggcagcctcatagtcaatcccagttgcttttccccagatttggtgactcatcaatggatatgtgttttggatgtatgatatgcttggtttaaattctctttgtccaggtcaaaaatttggaacttgtttcttattttactatgtctaggtttgcaagaattgacataatgtttgtttcactgatttaaaaaattttgcatgtaagaatgtactttaggaaacatacccaggaagtacagttgataaatataacatcaactgaaatagtcaattagcaattttgtgtttctaaatatctatggtcccctgaaattttgacttagtatataggtgcagagacacccacttagaaagttaactgtttggaaaaacatttctctttagtttcaaaaaccatatataattaaatttgtaaggatatactgagtaccctaggccaacttttttttctttgcagagaaccttttttgttttattcttcagtgttcatatagcacctggcccattacatatctaggcaactaaaaacaaacattgtaagaatgaatatttttaatgtagtaattcctagttacaatagatacataaagtaatgaactcagcattctgtacttttgcttcaggtttgaagtaaaaattatctagttaaattttttttatttcacgttaccatgccatttcacattaccataccatcagatagcatggcttattgtgggcatttctgcagtgaatacattttccaaaacagttaaattgtctgtttggatttgctttaaagtcttgtgtaagagagaagaaactatttctataataaaaagcactctcatcagatatctgacataattagatacaatataacattttactaagttcagtattcatgttttaaaggtgtttatactgatttgattgtgctggcaaatatactgtattgttaatattgaactgtttatttttctcttagtcttcttatttaattaacttcattgccgctggattctgttcagcctttaaaaatatttcttagtggtcattgctctgcagaactcaaaaagaaaattgtacttgttcatagacatttttaaagggttaatttattgttcagccttatcccttggcacgtaaacagactactagacttattgtaggttcgtttgagctttgtgttgtaaaattaaaaatgcttctataaagttttcaaggtagggagtgattttattattgtgtatatctaatatattaagtatgtgtgatactaaggtttgactgctataattatttgtactgttgatcacatgtacttaaaacatctgatactgtattctaagacaggttgtttttgcaattaaatttattttaataagacgatcatgaataaaacttaaaaaaaaaaaaaaaaaaaaaaaaaaa

SEQ ID NO: 14 - DNA, 1783 bp, Homo sapiens
tcgagcccgctttccagggaccctacctgagggcccacaggtgaggcagcctggcctagcaggccccacgccaccgcctctgcctccaggccgcccgctgctgcggggccaccatgctcctgcccaggcctggagactgacccgaccccggcactacctcgaggctccgcccccacctgctggaccccagggtcccaccctggcccaggaggtcagccagggaatcattaacaagaggcagtgacatggcgcagaaggagggtggccggactgtgccatgctgctccagacccaaggtggcagctctcactgcggggaccctgctacttctgacagccatcggggcggcatcctgggccattgtggctgttctcctcaggagtgaccaggagccgctgtacccagtgcaggtcagctctgcggacgctcggctcatggtctttgacaagacggaagggacgtggcggctgctgtgctcctcgcgctccaacgccagggtagccggactcagctgcgaggagatgggcttcctcagggcactgacccactccgagctggacgtgcgaacggcgggcgccaatggcacgtcgggcttcttctgtgtggacgaggggaggctgccccacacccagaggctgctggaggtcatctccgtgtgtgattgccccagaggccgtttcttggccgccatctgccaagactgtggccgcaggaagctgcccgtggaccgcatcgtgggaggccgggacaccagcttgggccggtggccgtggcaagtcagccttcgctatgatggagcacacctctgtgggggatccctgctctccggggactgggtgctgacagccgcccactgcttcccggagcggaaccgggtcctgtcccgatggcgagtgtttgccggtgccgtggcccaggcctctccccacggtctgcagctgggggtgcaggctgtggtctaccacgggggctatcttccctttcgggaccccaacagcgaggagaacagcaacgatattgccctggtccacctctccagtcccctgcccctcacagaatacatccagcctgtgtgcctcccagctgccggccaggccctggtggatggcaagatctgtaccgtgacgggctggggcaacacgcagtactatggccaacaggccggggtactccaggaggctcgagtccccataatcagcaatgatgtctgcaatggcgctgacttctatggaaaccagatcaagcccaagatgttctgtgctggctaccccgagggtggcattgatgcctgccagggcgacagcggtggtccctttgtgtgtgaggacagcatctctcggacgccacgttggcggctgtgtggcattgtgagttggggcactggctgtgccctggcccagaagccaggcgtctacaccaaagtcagtgacttccgggagtggatcttccaggccataaagactcactccgaagccagcggcatggtgacccagctctgaccggtggcttctcgctgcgcagcctccagggcccgaggtgatcccggtggtgggatccacgctgggccgaggatgggacgtttttcttcttgggcccggtccacaggtccaaggacaccctccctccagggtcctctcttccacagtggcgggcccactcagccccgagaccacccaacctcaccctcctgacccccatgtaaatattgttctgctgtctgggactcctgtctaggtgcccctgatgatgggatgctctttaaataataaagatggttttgatt

SEQ ID NO: 15 - DNA, 2355 bp, Homo sapiens
ccgttgcctcaacgtccaacccttctgcagggctgcagtccggccaccccaagaccttgctgcagggtgcttcggatcctgatcgtgagtcgcggggtccactccccgcccttagccagtgcccagggggcaacagcggcgatcgcaacctctagtttgagtcaaggtccagtttgaatgaccgctctcagctggtgaagacatgaccaccctggactccaacaacaacacaggtggcgtcatcacctacattggctccagtggctcctccccaagccgcaccagccctgaatccctctatagtgacaactccaatggcagcttccagtccctgacccaaggctgtcccacctacttcccaccatcccccactggctccctcacccaagacccggctcgctcctttgggagcattccacccagcctgagtgatgacggctccccttcttcctcatcttcctcgtcgtcatcctcctcctccttctataatgggagcccccctgggagtctacaagtggccatggaggacagcagccgagtgtcccccagcaagagcaccagcaacatcaccaagctgaatggcatggtgttactgtgtaaagtgtgtggggacgttgcctcgggcttccactacggtgtgctcgcctgcgagggctgcaagggctttttccgtcggagcatccagcagaacatccagtacaaaaggtgtctgaagaatgagaattgctccatcgtccgcatcaatcgcaaccgctgccagcaatgtcgcttcaagaagtgtctctctgtgggcatgtctcgagacgctgtgcgttttgggcgcatccccaaacgagagaagcagcggatgcttgctgagatgcagagtgccatgaacctggccaacaaccagttgagcagccagtgcccgctggagacttcacccacccagcaccccaccccaggccccatgggcccctcgccaccccctgctccggtcccctcacccctggtgggcttctcccagtttccacaacagctgacgcctcccagatccccaagccctgagcccacagtggaggatgtgatatcccaggtggcccgggcccatcgagagatcttcacctacgcccatgacaagctgggcagctcacctggcaacttcaatgccaaccatgcatcaggtagccctccagccaccaccccacatcgctgggaaaatcagggctgcccacctgcccccaatgacaacaacaccttggctgcccagcgtcataacgaggccctaaatggtctgcgccaggctccctcctcctaccctcccacctggcctcctggccctgcacaccacagctgccaccagtccaacagcaacgggcaccgtctatgccccacccacgtgtatgcagccccagaaggcaaggcacctgccaacagtccccggcagggcaactcaaagaatgttctgctggcatgtcctatgaacatgtacccgcatggacgcagtgggcgaacggtgcaggagatctgggaggatttctccatgagcttcacgcccgctgtgcgggaggtggtagagtttgccaaacacatcccgggcttccgtgacctttctcagcatgaccaagtcaccctgcttaaggctggcacctttgaggtgctgatggtgcgctttgcttcgttgttcaacgtgaaggaccagacagtgatgttcctaagccggaccacctacagcctgcaggagcttggtgccatgggcatgggagacctgctcagtgccatgttcgacttcagcgagaagctcaactccctggcgcttaccgaggaggagctgggcctcttcaccgcggtggtgcttgtctctgcagaccgctcgggcatggagaattccgcttcggtggagcagctccaggagacgctgctgcgggctcttcgggctctggtgctgaagaaccggcccttggagacttcccgcttcaccaagctgctgctcaagctgccggacctgcggaccctgaacaacatgcattccgagaagctgctgtccttccgggtggacgcccagtgacccgcccggccggccttctgccgctgcccccttgtacagaatcgaactctgcacttctctctcctttacgagacgaaaaggaaaagcaaaccagaatcttatttatattgttataaaatattccaagatgagcctctggccccctgagccttcttgtaaatacctgcctccctcccccatcaccgaacttcccctcctcccctatttaaaccactctgtctcccccacaaccctcccctggccctctgatttgttctgttcctgtctcaaatccaatagttcacagctaaaaaaaaaaaaaaaaaaag

SEQ ID NO: 16 - DNA, 2347 bp, Homo sapiens
agagagagagagagagagagagagagagagagagagagagagagagagagagagagagagagaggaacgaggccgtcgcatctttgtgtctgcttcctgtgggacgtggtggtagccgttgggttgggaaagtgagggatttttggcctcgtttctcctgcttcttttctcctcccttttactttgccggtagaacacagttatgggtcgcaagaagaagaagcagctgaagccgtggtgctggtattgtaatagagattttgatgatgagaagatccttattcagcaccaaaaagcaaagcattttaaatgccatatatgtcacaagaaattgtatacaggacctggcttagctattcattgcatgcaggtacataaagaaacaatagatgccgtaccaaatgcaatacctggaagaacagacatagagttggaaatatatggtatggaaggtattccagaaaaagacatggatgaaagacgacgacttcttgaacagaaaacacaagaaagtcaaaaaaagaagcaacaagatgattctgatgaatatgatgatgacgactctgcagcctcaacttcatttcagccacagcctgttcaacctcagcaaggttatattcctccaatggcacagccaggactgccaccagtaccaggagcaccaggaatgcctccaggcatacctccattaatgccaggtgttcctcctctgatgccaggaatgccaccagttatgccaggcatgccacctggaatgatgccaatgggtggaatgatgccacctggaccaggaataccacctctgatgcctggaatgccaccaggtatgcccccacctgttccacgtcctggaattcctccaatgactcaagcacaggctgtttcagcgccaggtattcttaatagaccacctgcaccaacagcaactgtacctgccccacagcctccagttactaagcctcttttccccagtgctggacagatggggacacctgtcacaagctcaagtacagcttcatccaattcagaaagtctgtctgcatcttctaaagctctgtttcctagcacagcacaagctcaggcagctgtccaaggacctgttggtacagatttcaaacccttaaatagtacccctgcaacaactacagaacccccaaagcctacattccctgcttatacacagtctacagcttcaacaactagtacaacaaatagtactgcagctaaaccagcggcttcaataacaagtaagcctgctacacttacaacaactagtgcaaccagtaagttgatccatccagatgaggatatatccctggaagagagaagggcacagttacctaagtatcaacgtaatcttcctcggccaggacaggcccccatcggtaatccaccagttggaccaattggaggtatgatgccaccacagccaggcatcccacagcaacaaggaatgagacccccaatgccacctcatggtcagtatggtggtcatcatcaaggcatgccaggataccttcctggtgctatgcccccgtatgggcagggaccgccaatggtgcccccttaccagggtgggcctcctcgacctccgatgggaatgagacctcctgtaatgtcgcaaggtggccgttactgatcttacttcatccagtctaataggtttggagattaaaccttttctcaacttgtgctgtttatatagccaagcttccgtcaataaggcttcattgtgactttaacaaacattatcttcccacataccaggaactattggacatttattttacatgggaaaaattatttggaataataaagcaggaacttttcctgaagttgcaatttatactgtatggcttctttttcatgtttcatctaggtttttagaagtgaagtatagtaaatttggttcgttaaattgtgaaggcgctggaattacatgaacataccaccctagtaaaggcaagttctgtaagcttacattgctatttgtaaagtttgccttcacagcatttcagatgctgttggacttcatgtccccaacctagcttggtgagggctgtaactgtttccaagtacttgtacattggaagtctgaatgtgtaacaatatttaatgtatttagagttcctcatgttgcagggtttaagaaatctgacccaccaaggtcatgtgacttttctgtactgttaaacttcattgtaataaaatgagagaaaaatttatgcctttttattcataacccagctgtggaccactgcctgaaaggtttgtacagatgcatgccacagtagatgtccacataataaaattcatagttaccaatgcaataaaaaaaaaaaaaaaa

SEQ ID NO: 17 - DNA, 3295 bp, Homo sapiens
tggagagggacaggaggaaacgcagcgccagcagcatctcatctaccctccttgacacctccccgtggctccagccagaccctagaggtcagccttgcggaccaacaggaggactcccagctttcccttttcaagaggtccccagacaccggccaccctcttccagcccctgcggccagtgcaaggaggcaccaatgctctgaggctgtcgcgtggtgcagcgtcgagcatcctcgccgaggtcctttctgctgcctgtcccgcctcaccccgctccatcacaccagctggccctctttgcttccttttcccagaatcgttaagccccgactcccactagcacctcgtaccaacctcgccccaccccatcctcctgccttcccgcgctccggtgtcccccgctgccatgagctcccccatcagcaagagccgctcgcttgccgccttcctgcagcagctgcgcagtccgaggcagcccccgagactggtgacatctacggcgtacacgtcccctcagccgcgagaggtgccagtctgcccgctgacagctggtggcgagactcagaacgcggccgccctgccgggccccaccagctggccactgctgggcagcctgctgcagattctctggaaagggggtctcaagaaacagcacgacaccctggtggagtaccacaagaagtatggcaagattttccgcatgaagttgggttcctttgagtcggtgcacctgggctcgccatgcctgctggaagcgctgtaccgcaccgagagcgcgtacccgcagcggctggagatcaaaccgtggaaggcctatcgcgactaccgcaaagaaggctacgggctgctgatcctggaaggggaagactggcagcgggtccggagtgcctttcaaaagaaactaatgaaaccaggggaagtgatgaagctggacaacaaaatcaatgaggtcttggccgattttatgggcagaatagatgagctctgtgatgaaagaggccacgtcgaagacttgtacagcgaactgaacaaatggtcgtttgaaagtatctgcctcgtgttgtatgagaagagatttgggcttctccagaagaatgcaggggatgaagctgtgaacttcatcatggccatcaaaacaatgatgagcacgtttgggaggatgatggtcactccagtcgagctgcacaagagcctcaacaccaaggtctggcaggaccacactctggcctgggacaccattttcaaatcagtcaaagcttgtatcgacaaccggttagagaagtattctcagcagcctagtgcagatttcctttgtgacatttatcaccagaatcggctttcaaagaaagaattgtatgctgctgtcacagagctccagctggctgcggtggaaacgacagcaaacagtctaatgtggattctctacaatttatcccgtaatccccaagtgcaacaaaagcttcttaaggaaattcaaagtgtattacctgagaatcaggtgccacgggcagaagatttgaggaatatgccgtatttaaaagcctgtctgaaagaatctatgaggcttacgccgagtgtaccatttacaactcggactcttgacaaggcaacagttctgggtgaatatgctttacccaaaggaacagtgctcatgctaaatacccaggtgttgggatccagtgaagacaattttgaagattcaagtcagtttagacctgaacgttggcttcaggagaaggaaaaaattaatccttttgcgcatcttccatttggcgttggaaaaagaatgtgcattggtcgccgattagcagagcttcaactgcatttggctctttgttggattgtccgcaaatacgacatccaggccacagacaatgagcctgttgagatgctacactcaggcaccctggtgcccagccgggaactccccatcgcgttttgccagcgataatacgcctcagatggtggtatttgctaacatcatatccaactcagggaagcggactgagtgctgggatccaaggcattctacagggttcactgctggtttacacttcacctgtgtcagcaccatcttcaggtgcttagaatggcctgggagcctgttctgtcttgcatcttccatgacatgaaagggaggctggcacttgtcagtcaggtagaggttacaaaccgtttcaggccctgcctaccacattcactgtttgaatctttaattcccaagaataagtttacatttcacaatgaatgacctacaacagctaaattttctggggctgggagtaatactgacaatccatttactgtagctctgcttaatgtactacttaggaaaatgtccctgcttaataatgtaagccaagctaaatgatggttaaagttatcaggcctcccatgaaattgcgttcttcctgcattgaaataaaaacattattgggaaactagagaacacctctatttttaaaaggactttaacgaagtcaaacaacttataagactagtgattcactggggcattattttgttagaggaccttaaaattgtttattttttaaatgtgattcctttatggcattagggtaaagatgaagcaataatttttaaattgtgtatgtgcatatgaagcacagacatgcatgtgtgtgtgtgtctgtgtgtgtgtgtccgtgtatgtgtgtgtgggttctaatggtaatttgcctcagtcatttttttaatatttgcagtacttgatttaggatctgtggtgcagggcaatgtttcaaagtttagtcacagcttaaaaacattcagtgtgactttaatattataaaatgatttcccatgccataatttttctgtctattaaatgggacaagtgtaaagcatgcaaaagttagagatctgttatataacatttgttttgtgatttgaactcctaggaaaaatatgatttcataaatgtaaaatgcacagaaatgcatgcaatacttataagacttaaaaattgtgtttacagatggtttatttgtgcatatttttactactgcttttcctaaatgcatactgtatataattctgtgtatttgataaatatttcttcctacattatatttttagaatatttcagaaatatacatttatgtctttatattgtaataaatatgtacatatctaggtatatgctttctctctgctgtgaaattatttttagaattataaattcacgtcttgtcagatttcatctgtataccttcaaattctctgaaagtaaaaataaaagtttttaaatattaaaaaaaaaaaaaaaaaaaaa

SEQ ID NO: 18 - DNA, 165883 bp, Homo sapiens
gcttcacagacagcccccattacttcaatcaagcccaaatttcctcctcatctgttacctatcttggcataattctcataaaaacacacgtgctctccctgccaatcgtgtctgactgatcactcaaaccccagcaccttctacaaaacaacaactcctttccttcctaggcatggttagcgcggtcagaattcttacacaagagccaggaccgcaccctgtagcttttctgtccaaataacttgacattactgttttagcctagccctcatgtctgcgtgcagcggctgccgctgcattaatacttttagaggccctcaaaatcgcaaactgtgctcaactcactctctatagttctcataacttccaaaatctattttcttcctcatacctgacgcatatactttctgcttcctggctccttcagctatactcactctttgttgagtctcccacaattaccgttgttcctggcccggacttcaatctggcctcccacattattcctgataccacacctgacccccatgactgtatctctctgatccacctgacattcaccccatttccccaaatttccttctttcctgttcctcaccctgctcacacttgatttattgatggcagttccaccaggcctaatcgccacacaccagcaaaggcaggttatgctatagtacaagccactagcccgcctcttagaacctctcatttcctttccatcgtggaaatctatcctcaaggaaataacttctcagtgttccatctgctattctactactcctcagggattattcaggccccctcccttccctacacatcaagctcgaggatttgcccccgcccaggactggcaaattagctttactcaacatgccctgagtcagataactaaaatacctcttagtctaggtagatactttcactggataggtagaggcctttcctacagggtctgagaaggccaccgcagtcatttcttcccttctgtcggacataattcctcagtttaggcttcccacctctatacagtctgataacagacgagcctttattagtcaaatcagccaagcagtttttcaggctcttagtattcagtgaaacctttatatcccttacggtcctccgtcttcaagaaaagtagaatggactaaaggtcttttaaaaacacacctcaccaagccagccaccaacttaaaaaggaccggacaatacttttaccactttcccttctcagaattcaggcctgtcctcggaatgctacagggtacagcccatttgagctcctgtatagatgctctttttattaggccccagtctcattccagacaccagaccaacttagactgtgcccccaaaaaaacttggcatccctactatcttctgtctagtcatacatactcctattcaccgttctcaactactcatacatgccctgctcttgattacactgccagtttacactgtttttccaagccatcacagctgatatctcctgatgctatccccaaactgccacacttaactcttgaagtaaataaataatctttgctggcaggactatgctgaatctccttaggcactctctaatcagatatcctgagtcatcccaattcttagacgttttatacctgtttttctccttccgttattccatttagtttctcaattcatccaaaaccgtatccaggccatcaccaaatgtttcttctaacaaccccacaatatcaccccttaccacaagacctcccttcagcttaatctctcccactctaggttcccacaccgcccctaatcccgcttgaagcagccctgagaaacatcgcccattctctctccataccaccccccaaaaatttttgccgcgccaacacttcaacatcgttttgttttatttttcttattaatataagaaggcaggaatgtcaggcctctgagcccaagccaagccatcgcatcccctgtgacttgcacgtatacacccagatggcctgaagtaactgaagaatcacaaaagaagtgaatatgccctgccccaccttaactgatgacattccaccacaaaagaagtgaaaatggccagtccttgccttaagtgatgacattcccttgtgaaagtccttttcctggctcatcctggctcaaaaagcacccccactgagcaccttgtgacccccactcctgcccgccagagaacaaaccccctttgactgtaactttcctttacctacccaaatcctataaaacggccccacccttatctcccttcgctgactctcttttcggactcagcctgcctgcacccaggtgaaataaacagccatgttgctcacacaaagcctgtttggtggtctcttcacagggacgtgcatgaaaggaagggctttagcacatcagacaactacccccattcattgacatgtatgttcgtctgttttctgctgctataacggaatacctgagactggataatatgttgaagaaaagaaatttatttggctcatggttctggaggctgggaagtccaagatagaggggctgcatttggtgagggccttcttgctgtgtcagcccacggcaaaggcagaagggctagagagcatgtgtccacatgagagaaaatgaggtcaatctcatccttttatctctcacaacagctaacccactcatgtaacaacagcattaattcattcatggaggcagaacccttatgacctaatcaccttccttttaaaggtcccacctctaaacacttttgcactagggattaagtttccaacacatgaactttggggaacacattcaaaccatagcaatgtgggtcatgaacatgttctcagttttatgtaaattgtgaaaaagcagctttagggcaagcctcttagtcatcccctttaccccacagttgcctctagctctgcctaagtggaaattctggccctactcctgacagggaggggctttatattacttggtcatcgttaaatcccaagcaataatgattggcagctcagtgctctaggtaaaagcatgagttctcgtgtttgagcacctggctttgggacctggtagcaccatttacaagtcatgttactcaactgctctgtgcctcattcctccatctgcaaagcaaatataattatatcagctacctctgggcagatgaggattagtgagttcattcatgagaagcacttagaccagcacctgactttgaacaaacactcaaacattagccaaagctattctcctccctccagtttgagatagagaaataatacttttcatgtggaccacatgtgatgaaagaagtctgaaagaagctaagaggatgaccatcaattaacaaccttcttggagggcacaactttcctctatcatgtctgagaatgtagagagggcttatcccagctcccctggttagctgagcctgactcaactgagcctccttaagaagatgaatagatcatggaaatttattagcaagcaccagaaccatcattgtggaagcatttctccaaaagccataattgaaggctagaatgtatgacatggggaagtggcaagggcctgaattaaacagggactttgtcacttcatttttcaagagggatgtgaaatctgcacagcctcagagatctgtatccagagttcagtgggtattcatccataacctgagaccagaagcgtttggctgagtcaggctgtcattaagggtcactgggggtgctgactgcagcttatcaaaggcatcctactaaactgagaaagccacagatgaaataaacaggaccttggccccactggaaatggagctttctttgcagggggctgaccttgtttttgtaaagggctttgattatcagttgatctgactccaacagggtcattctagggcagagggaaccacctccaagggaaccaatgctggtgccaacacacgtaggtgggtactgcccacttttgcttatgtaacccttcacctgccaacttccttcccacctctgccactatgggaaggtggcataaactcactgacatacccatttccaaggcctagcaggccagccttgtgtcctaactaacataagacaatgtttaagcacagttgcggggagcaccttttggctatcaaatgacaagtaacaatttgtgtctttcaaaagcagcagccaagcccaggtcacttcaggagggtgcagcatacagaccctcttctcccaccatgtgaaataagaactgctgttcactgagagcttatccaggaccacaccccttgatccacatggggatcctgtgagataagacaatctccacctacaaatgagaattaaggttcagagagattaagtaactagcacaaagcagcccagcaaggaagtatgagtggggattcatacttggggtgttgaatataacccagaggtgtcttacacatgctatgtctgaagatccccagaagccttattagtctttggtaaaactgagaggcagcgaagtttatttttggttgtctcctgcttggcattcagtgtttctcccccaaaattaacagagcacctctctttgttgggtgacccccttgcccaaacacgtgtattcccctttgtcttcttcccacctccattgtccaatccacatgctcttcgtgtttctgccttagcttccatctggaacaaagaacactgatgaatgaaacacatcaactcaaccaaccgaggttgatgatgactgctgcccacctcactcagggttactcatgcattcaaaacttaactccaaataatgaattgtgatggttctgaaaagtacccagtatggcctagagaaggggacctccaagctgtgtctaaaataatccaggccttgggttggccatggtggctcatgcctgtaatcccagcactttgggaggctgaggtgggcagatcacctgaggtcgggagtttgagaccagcctgaccaacatggagaaaccctgtctctagtaaaaatataaacaaattagccagccattgtggcacatgcctgtaatcccagctactccggaggctgaagcagaagaattgcttgaacccggaaggcagaggttgcggtgaaccgagatcacgccattgcacttcagcctgggcaacaagagcaaaactccgtctcaaaaataaataaataaataaataaattcgaggccaaagggctatgtgtgctttctttcctctcctccatatggttcttgagacgccatgaataatccagctatacccagcgattccggggggttcagaccagagctcccctggccataggcctttgagttatatccatttcaggggttccggagctgattcctaggctcagcgtaaaaagtcactaggcacagtggctaagcatcagatgcctgagtcaggcggcccagttcataacatgctctgccattaactagctcgttcgccctgtacacattacttaactgctctgagcttcagcttccttatctgtggggaggggccagcacataggaggcactctataaattgatggacaaatggcaataataaaatgaccttcttcatattcttcataggattgttgtggaggatatatgtgtgtgtgtgtgtgtgtgtgtgtgtgtgatttatatgtgatatatataaaggcagtgtttgactcctagtaagtactcaatagataaccattatactgtccaaaggtgtgacttgcccctgaccctggagatctgaatcatataaggggtcaaaaggcatgaattcgaatggtgggtgagactcagaagtggcctgctatagttctgggccattacattcctgttaggtgcccaggttatggtctagtgagcaggagaagatccagttgcccccaactccctctcagtgaggggatggaagttagtgagccaggccctgtcctttgatatgcatggcagggcttcagtccgaatggggaaacagggaaacttgttgttggttgatgtgcctcctggtcctcattcctcaacaccagactcattccagacccctgctggtgcaccgtgcaccatgaggctcagcagggccctacacccaggatgggtcaggctggctcaggaagtgaactggactaagctgccatgggagacatcgctgctttagctgagattctgggctactctggggtcctgaccccagggggttctggggacttttgccatagccctgatcacatggctgaaggaatcagtcactcccatctgctgagggatggaagcagggaaaattgtcagaccatctaagtcacttatttcttactcatgcctttatctgtccatccaaaaataattactaaattactacctattccagctcctgtaccagagacagtgaaaataaaaagccccttggaatttacaatctgttaggagaggcccaactaaatgaacaattacagcaaaacatgattaatggagcaaaagcaggtgccatgggaacatagcagggcagcttacctaggctgagccagagaggcttcctggaggaagaggcacttccattatggttagtgattattaataatattccctcattcttaaatatgaaatactatatatacccccaaataaagtgagctctttttcccaaaaaaattatctttttaaagaaaaaggagagaggagttgcctttttctgagtttttacagtcacatttttcatagcaatgaatctctctgtaagattttacctagagtaacaaagttctagtaggaggaagtatgttaggctacatgacctcagtcaatactagtttgggattgtttaaacagatgaccatataaatttggctgcaaataaagaaggcaaaagagcataaaacaaatgtagtgattattcctgcagctgtgtcctcactgttgtgttagatattgtaagcaagcatgccaaagacacttatgatacagtgataagttatttccttgaaatatttccatgtatgctgtcttagtcttttggggctgctataacaaaatatcataggctgaatagcttatagagagcagaaatttgttcctcctagttttaaaggcttggaagtccaaaatcaaggtactggcagattcagtgtctgttaagggctttctggttcataaatgataccttcttgcttgtcctcacatggtggaagaggcaaacaagctctttcagtcctcttttataatggcactaatcccactcatgcgggctccatcctcatgacctaatcacctcccaaagaccccacctcctaataccatcaccttgggggctacaatttcaacctgtgaatttgagggtgaacacaaacattcagaccatagcatatgcaatggtagtttgctatcagtgtcatatatggattcaaaaaggctctagctcaacagtgctctgaaaaaccactgcaaatgcagctctggtaagaaaaagacagtgatgtcaaagacacctgcagtgtaatgaagtattttagtaaagtgtactccaaaataaaatgctttatgtactatgtgatttttaaatacatctgtattcctaaattaatagattaagtacttaagtagacatttgactagttgacctatgaagagacttcaaaaagttcatgggaaaatggaattaaaagataaaaataaaaaacataaactttatttctcaacataatctccatcaagtttaagacacttttgtaagcaatgataccagtcatttattccatccctaaagaacttagggtcctggaatttaaccatgtccatgcagactttcttacatttttaactgaagaaaaatggatgccctttacagatgtttttaagattaggaaacaaaaataagtcagaggaaccaactcaggactgtaaagtggatgcccaatgacttctcatctaaactctcacaaagttgcccttgtttgatgagagtaatgagcacaaacattgtcatggtgaagaagaaccctctgttgaagatttcctgggtgtttttctgttaaagctttggctagctttcttaagacactctaataataggtagatgttactgttctttggccctccagaaggtcaataaacaaaatgccttgagcatcccacaaaactattgccatcactttgctcttgacccgtatgcttttgcattgactggactccttcaacctcttggtagtcattgctttgatcgtactttgtcttcaggattgtatcggtaaacccatgttttatctcctattacaattcttcaaagaaatgcttcagactcttgatcccacttgtttaaaatttccattgaaatctttcttctggtctgtagctgatctgggtgcagtggtttggcacccatcaagtggaaagtttgctcaattttaacttttcagtcagaattgtgtaagctgaatcaattgaggtgtctgtggtgttggctattgttcctactgttaattgtcagtcctcttcaattaggacatgaacaggatgatctgctgctgcaggctttatcttcaatatcatcttctcctcttaaaacaagttatccgcttgtaaactgctgatttctttggggcccttgtccccataaacttttcataaagcatcagtgattccatcaaacttcaccataaatttaatgtttgttcttgtttcaattttagtagaattcatgttgctttgataggatctctttttaaagtgatatcttatccttcttagtgcctcaaactagatcctcctcagacatgttataacatggtagtacaagtttatctcggtgcaaaaaaatttttgaaatccatgcctagttttttcataagatacattttccatgaactttttgaaagccacttgcatatcctagactttgtacaatcagattgacaagggaaaaaaaacactttgggaaaaatcttattgaggaaatgaagactgtcttaacttctagcttgtctcctatttgggcaagatgagagttctcttcagtcacttggtcaaccaacaagaatgtgttgagtgcctacctgagtattatgggggctactaaagggaaaacagaggtctccctgtccaagagtttgccctcttgctggggagacaggacacagtgatgggaaaggatcagagaacaggacacagtgtggggtggggagggggaatcccctgtagaactggcatgacccatttgtgaaagcacattctccaaatgcaggtccactgtgtcttgaacgtggaagcaccccatgtccttagatacttgtcaacaggggctacagcccaggcaaaaggagaaaattaaccctgaagtgtcctctattaccaatgtggcccccaaagacatggagaaggttcatgcaggggccctcgataagccaatgtgtggcagacaaggcaaggaatcacagggagccacccaccatgcgaccccatctgccatatcgccagcccctagccatcctctaggttcctctgaggtgcatgaggttctctctcatgtcattctgagagagacatgtcatgaggttctctctcatgtcattctgagagtgtcattctgacactcttcaagcagtctgacagtgccagtcccctgcctgtgctatggctcctggcgcttctgcggctgcataaatgccatacccaaagcaaagcccaaggtgcagataagctgtgccttgtgcctgtacccacagagcacctttgaccaggtccagaccctgccagtggccctctaacaccacaatgcttcatcgtgagttcaccagcgggcacagacattatcccccggccatcagaggcaagtgcctgggcagagcaggcagaaacaaattgctttacagccactaccttgaatctgacacacatcccttttccaaagtgtgcacctcactggcaacttctaagtgaaattcatgggaaagtatttagcaaatcacatgctgacacatttatcttgttagctgtcaaaatgagtaagtatgcacgttgaatgccatcattcagcctgaactgagaaaggctactaatcaagaaatctgacaaaataaatatgttttctaacctgatttgtcagatttatattaatcctttgttcagaccttgtcctaattgaccttaaatagacctatgatgacccaggtgactagagaccacgagccatcatgtgccctacatattaaagcgacatgctgcccacagggccctgcagagggtgtgatggagcagctatccacccagcaccccatattttactgccttttagtacctaattagcccgaaaaatctatcaaaaaccatatgttcaggccttgccacaaatgcaagcaaaaaagccatggggtaggtgaggtcatggtcacattctcaggggttctgtccacccttccgacagccagggcagagccttgaagtgagttcaatgtggaggaaatggtaagagcatggactctggggtggaaatacttcagagcactaacagacttcagagcagagaaatgtcggtaactgcccacatcctcccctgccctatcaaccctggcctggcctgaggcagcagattaattgctgactcatctgtacaggtttaggagttccagggaggacaagcccctgccccctcctttttctaagccttccttgaggacagccttctgagtgcctaccttcctctggtaacttgagattaggggcctaggaatctgtatgtgttaaagctccatggcactggggcccggtgtgcagatgtaaagacccccccagttggaggacagtgggcttccagctatgttcagaaagggcaaagcagacattaaaagcacaattttattttctctgaaagctcttgttttatttttaaatgtattttcttaaatgcataatgttcttgctctattaagataatcaaaattcaaaactcttccccaactcaaactgatctcccaaaatgtaacctatttatcctgtggtcttatgtactagtaatagctagaatttctggagcacttattaaacacttgggaacatcctaagagctttacctgtcctagctcatttaactctcacgattgcactatgaggaaaatagcattatctgtattttgccaatgaggaagcagaggcttggggagattatgtgaaatctcacccagccagaaagaagcagagctgggatttgtgtctaggtttgtttgaaccccaaactggcacctttaatcattgtgattggcagtcttctggtataagatgcacaatcctagaccagaggctattttcttccccagttgaggatggacttttaataacactcctcctcctcaaaggaacaattataacagcaataacaaacaatggtatgtgcaaggccactaagtgagtgtgtggaaggactagaactcagttctctaccattctttacagggaaggtgtgagaggttcagtgtgagatgctattcaagagacatggaaggaggcttataaaagtcccctacgccccagcctctcttcctacagggcactgacagagggggctggcaggggaatccacgatgggagggctacacacagatgtggtctagaagggtctacgcctggaagctaccaggtttcaagggtttgattttgcatctgaaaatgtgtatgctttcaaagggcacatctcaaaggaggtttcagtgcctgccgtcaccaaacatttttcttcaaattatatttccttgcaggttctgtctgaggagataatgtctgagaaaaagcctctggtcaccctgaaaagggaagttccataaaggcccttcacaaaatgctgacttgaatgtgtagctcagctgacaacatgaaaaatgcaagttagccaaaatagattgcagtaaacagggactatgcctccttgatttagactgtatcttgcccttcattcattctttcacccatgggatatttattgagcacctgctaggtagatgccatgcactatggtagatgctgtgcatacatagatagatatgccttttatgatttcaaagtcaaataaaaaaagacataaatatctgtctacacttagaatgaggaatataagaactaatggttgcatggcaataaataacaagagccagtagtaattgagcacctactatacatcagaggcttactaaaccattgctgtgtactaatgtgttgaaaatttacagaccctttaggatagatccaattagcatcccattttacagatgagggtatcaagccttagcaatattaaataacttgcctagcatctatagctggggcatttaaaaccaagctcctcaggctttggtttagagctgtttagctccagagctatgatctaaaggggcctgggtttgatcctagcctggtcacttagcagccataacacaggttgcagtgaggactaaaggcaaaatgcatgtgaggtgttgtcacccactctagtcatctagccatgaacttgaaggtctttgtgttttctgtagaggtctggactacatgcctcttcatctagctgtagttctggtgataggcagacaggcaaggaaagcatcagggaggtgaccttaaacaggattttgaaggagctgtacgagtttgccagacaatgtgttgtggggaacagagaagagaggacacaagaaaggatactctaggcatggaaatgacatgagtagaagcaattagatatggctggagcctatctcagggctgggctgggggcataaaaagaagaggccaaagaggcagacaggccacaggtcaggagaccatgggtgttgtgctaccaggttacacctgaccaaaggtgacagcggggcagtggaaaggtcactctgcaacaacatgcaacaaggtggaaagtgatcacagggggagacctgggtggcagccagaagcccagttaaagaagtattgacataattcaatgagagcttcattcattcattcaatctattagccaggtagtaggcaaatatttgaagattgtcttacagcaattctcaaattatgatatggggacccttgggagtcctgaagaccctttcaggggtatcaaagaggtcaaaactatgttctaatactactaagacagtatctgtctcttttactctcattatctcacaagtgtcctgtggagattcccagaggctgcacaaccacagataaaagaacatattgaaggcaggagcagatagaagaatccctagccttttattaagtcaaacagttaaagagatttgcaaaaatgtaaaacaaggccactcttcttaatacatgttttcgttttcaaaaatatagtcattttttcataaaaataggttctttatgttagcatgtaatgggtgtgatttttaaatgaactattgatttaagagtataataaatatttatatattttaaataagtatttttagacgttatgctttaatttctaatatgaaaatcttgatagatataatccaccaaaaaaaaattttgagagtgtaaaaagggtttctgaaacaaaatgtttgagagccacgggtatagtacatacggggtactgtctaggacactaggagtaaagcagtgaacaggcctcagtcagttcctgccctgtaggggctgtcattctagttagtggaggtccataaataaacagtgaacagcaaagagctgggtaatgggtgaagagcagtgagccaggctcgccttgctgtctttgtttgctggcagcaaagccctggtcccaccctcttctcttgctctcactgaatgccacagtccccaggggcatccatcctctgagggcatattagtccattttcacactgctataaagaactaccttagactgggtaatttattttaaaaagaggtttaattggctcacagttccgcaggcgtacaggaagcatggctggggaggcctcaggagacttacaatcatggtggaaggtgaagaggaagcaggcatgtcctacatggctggagaaggaggaagaacaaagggggagatgccacacacttttaagcaaccagaactcatgaaaactcactatcacgagaagcaagggggaagtccacgctcatgatcgaatcacctcccaccaagcccctcctgcaacactggggactacaatttgacatgagatttggacggggacacaaatccaaactatatcagagggcctctcacatgatggcagtttccctcccatgcccctcacagcacaaccagccctggcgttggggaaagggttcttcatgttcccactgcctcctccagtccctctccctctttcctgctcaggcattgatgtgttgttagaagcttcccagagccagagttcaaaatgattcccctgatatactcacaccattcatctcatagatgaattcttcacactctcctcctcaaaaacctcttccctgtccttactcacagcttcctaatccatggggaaaatggaaaaaatccaagaagaacatgcacctcactcctcaccccgtctaccctagtgcatctactctcagacgttctggcttccctcccccaccactctgttaccaagaatgaactctcctgctcctgccaccctccctgctgggcatcccactggctcctacattctccacttgccccttcactctctcctgcatcattcatgtttcactctttaccagaaatttcctattggcaaaataatacaatattacttccactaaaaaaaagaaaaaaaaatctttaccccacatccctctctattgccccaagtctgtattctctcttttaaagcaaaattctttaaaaggattgtctttactagctctctccaattcctctattctcatccattcctgaacccattccagtcataatttctctcccaccatcccattgaaactgtttcccaatgacacccaagtcactaaatccaaggtcaatttaagtcctcatcctgcttgactctttcaacagcacctcacccagttgatcatggtctcctctgaagcactttcattttcttccctttcttgggaaggaaaacccaagagtgggacttccagaatgtcccactctcggattttccttccttcatgagctactcattcttggtctcctttgctggttcctctttgtctccctgaattctgttagggtttagttctcagaactcttctctatactatagtcaccccctggataatttcagtcagtgtcagtgctttaaatactcttggccaggtccatggatcagcagtctccagcagtctagcagtaagaacagtgtttttctcccaagaataatttcttgggaatacgttgttgttttgggattgggagaatgtctctctaaaattccaagtaagcaccatgctttgctgaatttcagcaaatggagcctgtactgcctttttagtgaggattttgccttactaagctggattcctgctggttctttttcattattgcagcagaactggttcacatggaggactttcttccatgtaacattgatctcttaaagaccgaatctaatgtgcaaccacttgacataatgaccacaggagaagcacagaaagcaaatggagagctttgcattcctgctgtcactggtcatcatcatccaggctgcctaagcctccttggaaaacagagagacatcaccccatcacagcccccatcactggtcaaaacttgagttcatgctgtcagaccattctcattcattctctcacaagcctgagtttattacagcccacatctcagaggaaatattccatatcttgagtttatcactatctttattcagcctcccaacaattttagctaaagctacccaccaagccttctcttaaattctgcaatttgaaaaaaaaaagagataccattcaaggtattaactccattcttcattattcattcactcattcatttctgtacaaagctcagtacacatggtcaaacagggaagcagagatgtaaagcaactgaaaaactgctggaatggaggcaatacaaggttaagtagagtatcttctctttcatgccagtgttttcgtacatgtttttctccttgtttgaaataataatagctaaggtctaaagagcacttagtaatatgtcaagaaccatgtacaatttatttttcctcaactgaatggaatagctatttaacatctttttgccttagtttctcttctcaaagattgtggaagagtctcaagttgacaggcacgaacctaacataattttatttttttaggacctgaaagcagctatatatactctgtcattttagctattagagagtgtttgtcttctcactcaggactctgtgccatttattttaaaactgcaagcttctatttgcttcaaggttctccccctgaccatcccgcactgactggatttatagctcctctagtcccggatcatgggcaggggtgggttaggatctgcatttttaccacctcccctctgctgtctctttcagggattcaccttctggtgttgggcaggaagaagaaaggggcaaggcacctccttatgtgagtgctcatgctgaggttgttgtcctattttaatgttcatccaactccaatccagctcatggtctccagccttgggaagtaatatggtggtctcacacactctactgacaggccttcatctcatgtgactccttaggcatcaatggtcactttcctttttttgtttttgtttttgttttttttttggcagaactctcactgccttcctctggtgcatgaaactttttgtcccattctggagcagcctccacagtgcagcagcctcatcccatcaatcctctgcaggatgactggggtttccctttcgacatgactgtgccctctgacttctcttcccagtcctctgatgagttggaggagcaaatcatgagccccagctggattggacagggaccaggccacgaagggctggtaatggagtaaagcgtttatgctttaggccaggtggagccaccaaagaattttgaacaggggagtgatatgattagatttattacaatccttcttagaacacagcagagaatggacaggagagtgtcagactagcagcagggagactaatagagccaaatgccatgcttttccacttgcatattgtctgcaaacatggccaatcttgatcaccctttttgcttatgacgtaatctagaaggtgattcaacatgccttgggtgagtcggtcctttctgtctatggaaggctgtagtgggttgaattacatccccctcaaaggtatactgaaatcctaacccctggtacctgtgcctgtggccatagttgaaaataagatatttgcagatgtaatgaaattaaggtcatgatggattagggtgggctctaaatccagtgactggtgtccttttaaggacaggggaggtttgaagacacacaatgaagaaggctgtgtgaggagagaagcagacattggaaagatgcagctataagtcaaagaattccaaggactgctggcaaccaccaaaagccaggaaagacaaggaaggattctttctagagtctcagaggcagtgtggccctgctgatactttgatttccacaatgatgagaacattactgtttttttttaagtcaccaagtttgtggtaatttattatagcatccctaggaaacgaacacagggccaaataattacagaacattagaaccatctccatgatcagatgagaaagctcaggcccagagatgtgacgtggattcccgaagtccccagaggattcacggcaagtcccgtagataaggaaggtatacttggggaagcagggaccgtttaccctggtggtagtttctgacacttctttggctgcccgcatttgacttcagaccctcagctctttgcctaaccagacccttcttctcatcccctacccaagcctccctcagtcctctctccctgatcatccagtttgcaaactgtctgcccacccaggacctagctggagtcagctctggggatctgactcaacacctgtctgagcctgacccatccctgctgccaagtgcagccactggggtctccaagtcatctcgtgagctgaccctgagggatctctccagctcctagacccaaacatttattacactaaaggcaaggccacatcattttcatgagtctctttcccactagactataagctccttgaggaaagagaccatttacttttacaaatctttcttttttatacccagcacaatacctgatccatggtgagctctcaagaatactgaatgatgttgttaattgagtcatttctttacaagctgtctaacatgcctcagccctatggagagagattggaggggccccagggtcagttcacatgggaagttcccaccccatgaaaaagaatatgtgcaaagagatcaggcagagttaccagcagttaacaagtattccacaaaaaaagaatattgcatgtgcaaataagtttggggaaggctatgtcataaagagttaaacctctgtctttactataggacctggagggatcttgaatatgctaatatgcagctctccaagatgagtatcaataggaatcactcttctccacacaacacctgacttgcaccccgcgtcccttcttttctgctgaagaatatttggatttctagtgaatttctgttttgtttttaagaggaacatgagccaaaggcggaacatgagccaaaggaatcctcttgtgagctgtaagtctgcccgctcggtttgaagatgctgacatggccctaaatgtcaccacatggatattaaaatctttggcttctccccactccacagtgcctctgggctcttttgccagagtgctttacgggggaaaataggcagaggaaatagatgaccgcagtgttgcgtggcagtcacctaggagaccagctgtgcctctcaattctgagtgcagccccaaataaatgaggctctgatgtgtgcgagctgagcagatcgctccttgagcatgggggactgttgcgaatggaaacactttgagcctccactatgttagagaggaagaaagtggagcccagagaagtgacatagcttccacagcatcacggagccaatgcttgtctcgtcaaatgtaactctcaacctggttaaaactgtaactcaaccaccaaccattataaggtgctgtatttttaaaacttgcttcagaaataaatatatgcagtctggggtcctagcgtgggcgtagtaggaaggccagaagacaaaggcagccatcatcagccattaggatagcaagggattcctaggtagaggtgatgcaggtgtgatttgtctcctccagttctcagctgcacttattcccaccttttgctcactcccaggcaaccacaggggatctgggaaggaatcctcctcaggttccccaggagattctgccccagtttcctgagcattcacggctaacaattccaaggagaaagaggcacccggccttctctctaagggcatccctcttccctgtgttaaacctgcagcagcaagcccagctgagcacctcccacaccccctgaccctccaggggactctgcatcagggacagaaggggaagggagaaagtgtggtggctttgttgtccccttcacaccccactcagcatccattcaccttctctaagagcaccctgatccctgatttcctcctggtttgagttgtagtgggatggtaagcccaggcacctgccctccaaataaagcaatcaaaatctccttcccccagagcctccctcagtatcccagtgttacaggggacaggcatgggaccacactcagtagcaggggctttctcatctctgcatcttgagtccgtgtccctaggaatggtgatatgtccagagtcctactcccctgtggtggcaccctgggcatgcagtcctgctagaattctactcctggggctttgcttcctcatcctctagggctttctcaccttttgcttgtctcctagcctagttttccaacattccctctgattctacaggcacctgatctacctccccataaccccattcccctggccaaccagagtcactttatgttgcttgcaatcaaagacccctaaggatacaaatttgtgcaccaataatcctcagcagatgtagtaaatacttaaactctcaccaagtcccagaaagaggaaaatgtttggggagaagtgggaatggcaggggaagaaatccaggaagtctttgaaaaggaggagatgtctagggattggaaagatcccctacagggtcaggaatggcctaaacacttaagcaagtgcagacagggacgcttgtgcacaggtggagcagctgcagggaggggagaaagcagagtgtgtcccaggcgccccctctgccgctgcttctgcaggacagccacagctgggtccccccactgcaccttctccccagaactgagatgcaaatgcagccacaaaaaagctggcacccaccccttccttccacctctgggcaggggccaaggggaaaggggctggggtttctcagtggtgacaacaaagccaagccaaggaggcatatgtggcaaccttgcatcctcataagggtctttcctgaatgcccaagcccagagcttcctctgagcgtacctgggggccattgcagcattgggttctagtaacttctccccctctctgccgctccctccccgagcttactggaaaagttccctcttcatgtttacaattctccatttcccactgggccataatggcccatgctccataagcatggagactatgcttataatgctctgcattagtcatttccacagagattcaagcaaaacagcaaatccaagtgaattaattctgacaaaactctggcaaagaaaaaaaaaaggaaaaagggccaattgcttattatagtcctcaaagtcaaaacgaggggttacggcaacttatcttgtgttccccagtgtcaaggacaaaggtgagataagactgatcctcccttatgcctgcctctttcttcacaaggagattggaaataaggaaggtctgggaacaatttgttcaaggtttgagctgttggctcctaaacaaggagtgttcttggggaaaaacattataatgcaattgtgacgaaaatctcttttcagtagatttgcagaacattaaatccacagacggtctcagatgcagtccctagttgatgagaacagagcggcttttgaatctgagttttctccctgccgtacctgagaaccctctctttccatttggggtgctatgtttgaggtttggcaatgaagtggcatttccttaaaaggaaaagaaaatacatattttggtggctacggctcaggtagcacacgtttccagaggaaatgaaagtctttgaaaggaacgtttgcctccttcagtataaataatgttgatctgtcaatgtcttaacctctgtttggtgtttaatgagcaaaaatatatcttttcagacatggagcacactggatcctttttagtgggccacactggggtgaataaagatgaaaagaaaagcgttattgtgactccagtggaatacagtgttctttacgcaattattctgaagtttggatccaggctgttcctagggaaataccagctccttcaccggtatttttctttttctttttttctttttctgcctgcaaatcgtaacccctagaaattttaaattacttcttcgtgcttaacaaattaactaattagatgatttcatttggacattgcataatatggtagagttggggattggtcaagttccttgatttgatttgagaaccagttccaggagttactggctgatggacctcctgaaagccatttttcccttcaaagcctcagttaccacaggcatgaaggggggtgataatacccacctcacccccttcagctgttatgaagatcaaatgaaataatgaattgaaagtgctataatgcagatcaaataaaataacaaattgaaagtgctttgggaagtacaaagcatgtcacgattagaagagagggaaggaaaagggagtcatggtttattgggcacccaatgcgtaccaagtcttctgcaaactgactctcgcaatagcctcctaagccctctctacatctccaatcttaccatgctcgccccaatccaacccgaatggcatccaaaatgacagaaatcagatcatgtcatttccagctctaaaatcctcctgtctcccattgcaattataatagtatccaagctccttgccatggctttatgaggctctacctgactgcctcctctctccccagtgcctacttctctacttggtcatactggttcttcccattactggaccatgttcagcttctttctgttttggggcctttgcacatgtcttaacctcgccaatcctcttcctcctttgcaatttgcatgtcatttgcttcctctcagctagaactgccatattgaccagacctgttaagtaatatacatctccagggggtgccattcacatagactacagtctgcacgacagcacatggtggccctgttctcagcctccagcaccactcctgttatacccttgacttgcactacacttctccttcacagcaatttacacattcagaatcatttatttgttaaatgtctattttctccactagtccatcagggtagggaccatgacttccctgttcacctagaatcctcagcacctacaacagaaggtactcagtaaatgtgtatggactgactttccatgaagtacagatgagtacatatcatgctgtctcaacacaaggtcactaaataggcatgagcattgaggcttggcaagtatctcagcagcttcccatcatccatctccatccccagtgccagcattgacctggaagctaagaagtcctcctataccacagaccaggtgtagaggacctcagaggaagaagggcaaagggccactgggaactgagtcctgccttctgctgctaagagacacatcactgcccactagaagtatttagtgtctctctccagaaatgaactattccaaggaaaagtatatgagaacagactctcaagttctgaagagctgaattttaatcttgccctataatgggtgagctgatgattattggcaagtaattataaaatgttctatcctttatccttgctaggatttttttaattaaacaagtcactttataagtagaaccctgagctctaaggcagaatgactctaataatgtgatgcagcagtgttgttatacagtcgattaataaacctctcaaagtatgtggttgccattgcttccctctcacctgggtcttagctgtagctagcttcagtaataacttgttgattaatcaatcacaaaggatttagaaacagaaggtgatgtctgctctgtgttttgcataatattaaaataaataaccctagcaaactcagtgctcttttttggtgagacctcattcattgattcttagagcaaacatttatcaaatgtcttctctgcaccagggattgtgttatgtgttgggaaagatgcgtttcctgcctttaagaacctcaccagctagtgcagggggtggggggaaagagcgaaccaacgtgcaagcaaacaattgcaagcagaaggtcaagtctgttctgatggaggtatgcacagcatcccacggcagcacagcggggaagccaatcaactctgcctgagtgagaagacaattctcagggataccatcttagacaaagctactctgcatctcatgtagacactcaagggagaagaaggtgggaaggctttctggaatgtattagtccgttttcaggctgctaataaagacatacctgagactggatagtttataaagaaaaagaggtttaatgaattcacagttccttgtggctagggaggcctcacaatcatggcagaaggcaaaaggcatgtcttacatggcagcagtcaagacagaatgagagccaactgaaaggggaaaccccttataaaaccaccctatctcctgagacttattcactaccatgagaacagtatgggggaaaccacccccatgattcaattatctcccaccaggtctttcccagaacatgtgggaattatgggagctaaaattcaaaatgagatttgggtaggggcacagccaaaccatatcatggagctactcctgggcagtgagaaccaatcagattccttccaacttctagttatccatttaaatctgattcccatcatctgagtgcacacagacccacaggaaggagaacaaacaaggaactgtttgcagaataccagcccaggccctctccaggtagacaggaggtttatgggcagcaacatcactccaaattcctcttgaatgagtgaggtttggcagggggcactctgcctagtgcatttttcttcttcttcttcttcttttttttttttttttttttgtaaatttgtgtatttctgacgaaatttaattcttaggagtctcacttgcttacattccaaaatgccattttttattcaaggtataagaagcctctatacaccctttctttccaaaaatgttagatttttaaattcccaaagtccagaatgtaggctccagatttaagcctggaaaatcagtgaaagtttgagttacaagtgctctcatctctgactctctgggacttccacagggctggtggtgacatggtataaggccgtgcagtggacagcaagcttgagctggctgtgaccatcgcatctagattggagttgggggctggcttttgttgaccaactaaagttccatggagctttagaagggctggatagatcagaaaatattttgataaatttcctggaggaaagatgagagccaaggaaacaaaggaaatagctaaagtggtccacactagaaacataagtgaccaacaaacatatttaaaaatgctcatcatcactaatcagagaaatgcaaatcaaaaccacaatgagataccatctcataccagttagaatggctatcactaagaagtcaaaaaacaacagatgctggcaaagctatggagaagaaggaacacttacacactgttggtggaaatgtaaactagttcagtcgctatggaaagcagtttagagatttctcaaaaaacttagagctaccatttgattcagcaatcacatttctgggtatacacccctccagaatagataattctgccaaaagacacatgcactcctatgtctatcacctagctattcacaatagcaaagacatggaatcaacctaggtgcccatcagtggtggattggataaagaaaatgtagtacatatataccatgaaatactatgcagccacaaaaaaggatgaaatcatgtcctttcagcaacatggatggagctggaggccataatcctaactaattaatgcaggagcagaaaacaaaatactgcatgttctcacttataagtgggagctaaacattgagcacacatggacacaaacgtgggaacaatagacactgcagactactacagatgggagggagggagggggtatgggttgaaaaactacttattgagtactatgctccctacctgggtgcattatacctatataacaaacctgcacatgtaccccctgtatctaaaataaaagtcaacattaaaaaaagagaaagaaagaaatgggcagaaaccagggggcgggggagtgaatgaaaaagacaggagggaagatgggaacagaagagttgaggaccaagcaacatgaaggggtccaaggaacctttcgaagcagaattggatgacactgtgtttgagtcagtttctgatgctatggtacaattcctttcatctttccaagccttcagtaatgtcacctacacacaaaaaatgcctgtgggagaggtttgtttcaggaaagttagcaactgagttacttggcaaatgtagtgcaaggtcaaacatagactgaaataaacagacctaccgaatccctcagcctcctcctctgtccttgtggcatttatctctttgctgcttgggcaccatatttgggtgagacaatacgtaaattgattaatttagtggaagaaggagctcaaaacccaaggtgaccgaccacaagcatgtaatttaccccaaaattcctgtgactctggaggaagtagttggaagttccataacctgtagttcaagggtgcaatagtttgaatgtttttatcccctccaaaactcatgttgaaacttaatccccaatggaacagcattgggaggtggggccttttgggagacgtttaggccatgaaagctctgtctttgtgaatggattaatcccaccataaaaagggtttgcacaatatatccacatcacgtaatgggactagcttaccaccccccccaccataccaaacaaagactgccagcactacaaccaacacctgcattcgtcaagcaccaactgtgttgtgtacccagcaccattccaggcaatatgcagatatccactactttgaggtagttattcttacatgagcacaggggtgcttagagagcagacataaccatatatagaggtcactcaacaattctcataaacttaacttttgtttggtctgttcttttgatagcaaaaactgtttattagttctgccatctgtagcctgaagtatggaaaaaacataggttttggagcctacctctgacactttctgtgttaatttgggcaaattcctcaacctctctgagcctcagtttccatcacagatctaacactttcttccttgcaagattaatgtgatatatgtaaggaacctaacacagctgttgccatgtaatcagcactcaataaatcatagctaccattttaaaaagacagtggctggggagtcttgagggagttgagaaagtgtgttggctctcttccactcttctaccaggtgaggaacagcgtttatccctcctgaaggatgcagaattcaaggtaccatgttggaaatggagaccaggtccttagcagataccaaccctactggttccttgattttggacttctcagcttccagaactgtgagaactgaatttcttttctttacaaattacctattctcaggaattctgttatagcagcagaaaatggactcagagagtttgaacaatctccttttaccccttaaggggcaaagagaccccagctaaatctaggtctagaattttattttctcatttgatcatgtaataaatagaaataattgtcctatcttccaaaggaaaaggcccagagggtcttttatttccctaagtcccatacctaataagtaacaatccagaatttgaattcaagtcttcagctgcaatttttaaaaatgttttgtttagaaatttttatagacttacaggaagttgcaaaaacagtgcagagaggtccagtgaacgctttatccagcttccccaattttggggaattcttctgcaatttaatattcttcccttcacccactgaatttagggatgaagagctgagctgcaaagatgagttttgtgctacagcagcctttttaggtttacagatcatcaggccctgggtctctagctgagaatcagaaagtaaacagacaaagagttcagcctaaagaagttcaagtcccagagcagtggatctcaaccctagctgcacataatcattatctggagagctgtttaaaatacaggttccaatataatcaattagttctgggaattaggcttccatgttttctgaagctccttaggagtttctaacaggcagatagggttgagctgtgccattggtactaataggctctaaagtgagcccaccctctcatcagagcatggtgtcaagcgactctccttcctaagatcccatcgctgacaccaagatacctataagaggatcctgtgagtggagaggctcctggggtaacctggcagggaaatttgtctattgtgtttactgaaaggcattgtagtactgccactcagagctgtgcttccctttctgaaacagtcaagcagttccgggcacatcaaaggagattatcattcctctggcaccggctttgtttttcgctgcctctaaaagaaacaggtccacttatctccagaatgctttcccagaaagctcagtccctgctgggtgaggtcaccggtccacaatttgcgtccatcacaccttgtaggaagtgaggagaaactgacttgctttgttttccagcaccggggaaacagatttcttcttaagcttcacacaataaattgtattaaatcctttcagcagggtttccatggctatgtgaaaggaaaatcatacagtaattgttttaaataatacagcaaggcaagctggagagtacatcttaatttttgtcatctgtgctgtgttcctgtttgtacggaaatgttcccgaggcagaggaaaggtttctgcattcactgggagttgcttggtgaatgtaatgcaaggtcaaatacaaaccaaaataaacagacttactgaatccctcagcttcctcctgtccatgtgagccccagggcttgtctgcttactttaagtgggaattaggatggcatttatctctttgctgcttgggcactaaaactgagccttcgactgcataagcctgattcctgcttctccctcagtcctccataaggagacagagttagacgtctgccctagacaaaggcgatgcctgagaggaaccttgagtataaatttgtcccccagctgcctggtacctggggaattctgcagggttaggtctttccaccagtgttagcgcagtcatttacaacaaaacatcacgcataacagtcaaggtcctgtaatcccagcactttgggaggctgaggcgggtggatcacctgaggtcgggagttcaagaccagcctgaccaacctggagaaaccccatctctagtaaaaatacaaaattagccaggtgtggtggcgcatgcctgtaatcccagctactcgggaggctgaagcaggagaatcgcttgaacccgggaggtggaggttgcagtgagccaagatcatgccattgcactccagcctgggccacaagagtaaaactccgtctcaaaaaaagcaaaaataaaaaagagtcagggtcttcataatggactgtccaagattctgagccccaacaaccaggctgttgcaaactgcctaccctctctgagatttcatttcttcatcagtaaaacgaggacggtgaaacctatacacccagagattctggctctcaaatcaggtaaaggatataaagtgcctatcctagtatctgacaaagcatcagggctcaataaatagtaatagtgttttgttaccattatcattattagtatttggttgtagaagagactgcctctctcataataaggtgaaccagagggttgttgcctgcctgggtggtatccagattaaattcaacaactgccactgagccccttccagatgtcacagagctggctagtgttgggaaattggcaaaagtctgcttcctcccctgaaggagctctcagtctagaactaggaccctcaccaactgatgctgatgaacattacactcagattgtacttgaccatggctggcccatgttgtgcgattactccagggagaaagcagttcctaacttagtcctaaacaatcagttggataaggaaatagagagctctatactgtcactgacagaaaatgtcatgttgggtcccaatcctctgtaggcaattcagcttctaaagcaggatacaagtaaattccctcagccaagccccaaagagagtcagggcagactgcaccccagggcctagtcctttgaccacaatgatgctgatgagaacctcatgtggccgggaatggggaggtggaggaaagagaagataggagtcgaggaggcagagcctcaccaagcaagtatgagatcacttggcagacaaaccaacattggaaggaaaaggacattggccctagtcacagtctgccattttgaactctggaagtttattttagcttttttttttttttttttaacgttttacagcatggacaataaaaagtaagagaacacattaagaagattcgcccacacagaagtcatctgtggagccaaaaccaagacatagttgagatgttttgctttaatctgtgcctgtgagagacacttgctctgcaggccccatgggagttgtggaacagactcaccagattccagggctgcctgagagtgtgccagtctatggcccctagatgccagtgtggccctgtccttcggtgcctctggtcggtggcttttgcctacagttcactaggtcaatcccaagcctatccctttttccagatgcagctcatgactcactcgcttccctgtttagaactttttcccaaggtggagtaggttgatgccagagttggagcccctcctctgcactcccatgtcgccctctactatggtacttaccccctagccatacttcctgtttacctgtctgtctcccctgctggttcatgagcccctcatgatcacaggggaggaaccgtctcttaagtgtcgtgcgtccccagagcatagcacagggcctggtgcatagaggcatgcaataaatggttgttgaatgagtgaatgcctatataaataaatgaatgggtgacaaagctcactgagcacatcagtatggtgatgtgctgaacatcaagacattcctttaaacctctcagctggggtctagcctctttaagtttgccctcaccccatgtggaattccagcacccactcaccaatccacatgcacatacagtggacagcagcagcatcttaggcctccagggggcttcagagcccctgctccttctctctaggctagtgcctctggtctcactgtaacaagggctgggtctgctcacctgctcactatgaccttagtgagctaggcctgctcagcgcatgtggaggtggtacgtgccgtctatggaaccataacagccccattttaaaaggccaagtgtttctatttcttttgagcccaggattttttcagaacatttcccccatgaatcaaaatcccctatagtccattatagaaaaatggacagcaaatacaaagatgctaatgacctaaccttactctcaggtccttagtaaaatgaccagattcttaaattaattcttcccacatggccacaagcatctcatctacctttcaacaaaagcagatgactcacactggtttactaaccatagtaactacctactgacccactttctgtcactatattgtcgcttttcatacattctctcttttaattcccataacaaacccattaggtgggttctgttttgattcccattttatagatgaggaaaatgaagctcagatattttaggtgacttgcccacaatcacatagttgataaatgatgaacttgagatttgaaaccatgactgttgacctctaagatttaaccttatctggttatctcttgttacataacaaaccatcatcaaaatttaatggcttaaaacaatttactatgatctctcatggttctgtggattgactgggtcaggtgggaagttttcacctatagtctctcacgcagatgcagtcagatggcagctggggctgcagtcacctgaaagctgaactgggctggatgtccgagatgacaaatcatatggccaccagtcaatgttcactgaggactgggagttcttctggggctactgattgagcatttatatgtagtctgtgtggtttgtgcttctcacagaatttagaatccacaggatagtgggattctaaaaaggagtattctaagagaaaacttttcaagagatccaggcaggaactgcaaggcttctaatgccctagtctcacaagtcccaaacttcacttcctgtgtattctattggtcaagcaattccgcagggccagcttggattcaagaggagggagataagacaataactcttaataggaagagggtcaaagaatttgcagtcatctttgtcactgtctgctctctgattgcatattatttacattcctcccacatggtaaatacacgtgtctcctcctaagacccaaaagtctcatcccattatggcatccactcaagcttgaggtccaggattttatcatctaagtcagatcttgatgcagatgagcctccttggggtatagttccctgagtacagctctgtcaatctgaagacctgttagatgaagagacaagttatctgtcccacacacataaatacagtggtgatacagagataggataacttcactaaagctttcattcgaaagggaaagaaactggaggcacatcgcagtcactgatccatagcaattctaaactgctgccaggtgcatgttgccagatccttgattagtgagttcccagttgtgcctccctgggaatgattgtagctcttggctccccactcctagtgggattttgattctgctctctgaatcattcttccttttccataagaaatggccatgtttgcagcttagtagccttcttgtcctacttcctacccatataaggctctctgcagtttgaactgtctctttcctgtttagttcaggctgatggtgctttcgcatgtacaattctcttaaattttttgtaagtttcctaaagactgtttcaggttcactccattagtcaaatacatacctacaaatctctttaaggtatgccactttctgccttgggctgacagttaggtgctatggaacaatgcccttcagaattcttcaaagtctgtgaagtagactttcgcctctccgtgtggcctgggcttcttacagtatgtcaccttaaaggtttctaaaatcttagcaagcgtcttagagccatatctctgagatgatcattaccttataccatgtcttactttgagaactttttttccaactggagaggcttggaatggaaaacagctttatttctaaacccagcaagtctggcttcttatattccatctaagttttgcttgaaaccgaatagttcattatggaagaggggagttcacttccctatattcatactttaccatacttgcctaagagaaaccattaggcatgtttagcattctgcctggaagtctccttagccaaatctgccatttcctagatatattttctgtttttcacattaccaaaagcaacagtataccaaattatccatcattacaaaacaaaggatgcctttttccaacttccaataacaatgtcctcattttccctctagttctcagtaatagtttcctcagggacctcacagcttcttcctgctgcttggtccccaaagccaacatcccacattttaagttttcattatggcagcactccaggtaccaaattctgttctaagtatccacagttccacagaatgccacccaaaacataattgtttaaaactgcaatttattatttatcatggttttatgggttgacttcattcagctgggtgattcttatctgggctttctcctacagttgcagtcagatgttagctggggctgcactcagctgaaggcttgattgggatccgtgtctatatggcacactcagatagctggcagctgatactggctgtgggagggaagctcagttggagcacctacttatggcctctccatgtggcctgggcttcttacagtatgccacctggttccaagatggaccattctgagagtgaacgttccaggagacccaggcagaaactacaacacttcctctgacctaaacacagaagtcccagaacatcattttcactgtattttattagtcaagcaagtcactatggccagcttagattcaaaaagggaggaattaaggaaagaagaagacatagagacttgtctctcattaagaatccatctcttaatgagaagcaagcctgtgtcctctcctttcatactattctatacaaattatgggtcagctctgcatatctggtaactcattcctttaaatattgatgctgattctgctcccaaggccatcttgtctcttaccataaaaaaatacacatatcctactaatatatagactcaatttgacattcttctgagctttatatttgtaaaatatgttaacttttagtaactttaggacatatgaaagctaaaattgacaatggctctgtcaaacagccatccatggagaacctagatcaagaatattgcctctcaatccccagagctctctcactccacttgatggggccccacggggccaggtactgaggggactcccctctctgtatcccacccaacactagtttccccctgtgccctgggggagccctaaactgggcactggctcattctcacaaatattttaagggggagtggaaagggagggggtcatagctgttttgtttaactggaactagaacagggatcatgtcctattttaggacagaaagggggaaagatatcaggatctcacttatgcactggccaccaccactgtcactcatcactttgagtgtacgtccctcaagagtctgtataaattcaagtcagagctgcagctacacagccatccagtgtcatagaaaagcaattcatggatgactgatctctccattcggaaggatgcagtcttcacatacaatgatgagaaactgttattttataatctttttattaaaagcttggctgaaaaccaaaaaaaaaaaaaaaagaaagaaatattgcctctctttaggcaatttattcatgagcaattagctgcctgaaacaaagaagaaaacacccgaatcaaacatccttataaccttcaattaattaccactgctaagtggcagaccaaagtgtaagtctatgtccaattacacaccttatgggccattgcttttgttggtgtaataagccttcagcccccttttgctatcttcatccttcagaatggctatctgatgtgggtaaaagtgagtggtcattctccacttgtgcttcctctacctctgtcaacaagcatgacacggggaggaggctgttaggcaagaggggaggaggaatggaatgcagcaagggcctctgcaattttataactatgacaaagaatatacgctctcttgctcaaatgaccatttggcagtatctctcaccttgccgagagccagtatagcttggagagaatgggcacaagctctggagtcagggagctcgtatctggttcctggcccttccatttaatgtgcaacaatggacaagttattaaccctctttgtgccttatttcctcagttctcaatactcgtcctgcttctcctgttagtcacatgtaattacctgatcactccctccttttgaaaacacccagagtgaccgaagggtcagggagagctgacttaacactgggcaatcaggtgagcacatctgaggaggtggcatttaacctgagccttgaatgacaagaagaacccagcaggcttgtaacagtcatggcaggtgtattagtttcctgcagctgctgtaacaaattaccacaaattgggcagcttaaaacaacagaaatgtattctctcctagatctggaagccagaaatctgaaatcaaggtgacaaggctgccctccctccaaaggctccaggggagaacccgttccttgcctctgctggtggctcagaaattctttgactgtgaccacatctctccagtctctacctctgtggtcacattgcctcctcctcttctctgtgtgtcttcttctctgtgtgtctgtcctacaaggttgcttgtgattgcatttagagctacctgaataatccaggataagtgcctcttgtcaagattcttattttaatcacatatttttgctatgtagggtaatattcacaggttccagggatttgtaggtggacatatatttttggggccaccattcaacccgctgcagtgtggtcaaaaaataaaaagaaaatcagactggatggggacttttcagcctagtaaggggtttagttttactagcaatgagaagccattagagatctcaggcagagtttatactgagatgtgtgtgtgtgtgtttgtgtgtgtgtatgtatgtgtgtgtgtgtggtttttttttttttttttagaggcagtatcttgctctgtaacccaggctggagcacagtggtgcaatcctagctcactgtaaccttgaacccctgggttcaagcaatcctcctgtacctgaaactacaagcacacaccactgatagctaatttttacatttttaatagagtcggggtcttgatatgttgtcctggctggtctcaaactgctggcctcaagtgatcctcctgccttggtgtctcaaagtcctgggataacaggcgtgaaccactgtgcccatcctatactgagatatgtcttatgatgatcactgatcactcttgctgctttgtgaagaatggatttggagggagagtagaagtagaaagaccagttcagaggccattgccaatctgaaaacttgagtagggggcagatctgatattatccatgtagattacaggcaaataatccttcatcaaagcctgtaacacaatattgctcataagaacaatttttttgataaggcaacttctcattctaaatcctacaaaataggactatgtcctggccccactttattttacctttaacccaaataatttacttctgctattaactaaaatgaactcatgctctgttttccacagcatttggggacttcctccattataccaatgacatggttttagagtgaggaactcagagcagccttgagaagaagctaaaacatttggtaacaacaatcagaaagaacaatgtcaggtctgccatacaaaagtgaaaatatttgcagtggggagcaagtgggtaagtaatagactgaatacttcctgtcttaggctgatcaggtgccataacaaagtactgtagactgggtgacttatcaacaacataaatgtattttttacagttttagaggctggaggtctgagatagatcagggtgccaacatggttgggctctgatgagggccttcttctgggttgcagatggctgtcttctttttgtattctcacatggaggaaagagagcaagctagttccctggactcttcttataagggcattaatctcattcctgagggctccatcctcaagacttaattacctcccaaaggttccacctcctaatataatcatatttggattaggggtttcaatatatgaattttgggggaacacaaatagtcagtccattgcaccccggccatgccccgcaggcctttctttcacgacatgaagatttccttacaaccaactcagttgatgggtccattagcttacaggatgtgttcagaaacagactttctgcagagatgagactaagcatttttgtgattaaaaagaagcagtgcttttattaatgttgcttttcaggccacagttgtctctttcatgcatacagcagagatctctgaggtcttaaccaagtacatgcatctcatgtgattaaactagccattaaaatagaacattggttctatttcaaaaacagatgttggctctaccagcagttatccctgcagccaccctctggttttgccttgccttacagggaaagggaagagaggaccaacatttattgccacccactttgaggggtctcactttgtggcagagacttctgattgtccttcagtggtcacccttcctccctgtgccccttcaccctcgattagtaataggatccttgactgttaactagttagtgttgccagataaaatataggacatccagttaaatttgaatcccaaatgaacaatgaaaaaaaaatgtatgtttcaaatattgcatgagacatacttatgctcaaaaaattattcattatttatcttaaaattctgatttaactgggtgtcccatatttaactgggttgtactgaacaaagatgatgtttctcacctttccctgaggctaagtgagaccttgtgacaaaattctggccaaagggatgtaaataaaagtgttcttaaaagaaaataacgtgccctctccctttcttcttcctgcctgtgtgctgggatgtgaaggtaatccgggaactccagcagccattttggaccatgaagtgatcttgggaatggaagccattcgtggtacaacaagaagctagaaggagtctggtccctggtctagaagatgagtgaaaaatatacttctaccttattgaagtcactgttattttgttttttcctgctacttgcagctgaagctaatagtacctactacactatgtcttctaattctcagttaaccttgaaaggcacattattcacattttggcaaatagaatcctgaggctgagagaagtaacttggccaaggtggtcacatagtaatcattgagtcagattttgaaacccagtctatgcgaaaggtatcctgggctcttatttttctacaatacattccttctctgggtaataatttttatcaaattcctaaggttttgtagtataatattaaatttgcttctgcatgtctgctctctaaagcatttagctttctccctcaccaaaaatacagaacaagacatttctgctgtcaatgttataggatctaaaactccatccctagatctgatatttgagagatctgcaccaaacgacacattatttatttacttgtttcctttggggttgctaaagaaatgtttctagtctgtattataatagttccctgcaaaaatgtcttaagtgagttatgattcaatatgaagtgctcgcttttatagagaatcggtattaaaaggtctatttgtctatatcttttgaaacttactgggttgtttgttgttccttgtaaaatagaattttcatgcaataaatttcacactgaatttaatgccagaaaaaaatattttcaatatctattcaggcataattctatgtttttttgtttgtttgtttatatttttgtcaaatatcaagagaataggagaccttaacagttacttttttgctttggtttctaggaatcttggagttaaatctcatgtttatttgtggtcattcaatcattccagatactaaaatatttatttctgattttttcttttttaaaatccattttttctttttctccaacagtttttttctttttcttgtctctacatttccattttaggatacatttttattattattgactacctcaaatttgccttcatttatttcacaaatgcttattcattgcctcctttgcataccatacttgcctgaaagaaggtaagctgcaagctataaattcctaactgagcctttgcttgtaactcatgaatactattttctttcaaaatggccctacaaatctctaccaaataacttattccagaattagatgaagatcaacagtaaacccaatattttccaaaatttacattctttcttctgttttaaaaaccaaaatattagccccaccattctagccttctgacagaaagcacgtagcagtcacaaatttcaggtgctattaataggaccaaacctagagaaaattgtggagggagtagcgttttgacagcagcatttctgctgccatctcttttgcaattggggctttgctctgggttcccgaacactgagtacttctgggccctcttttcacccacttctagctaccaaccctcttctcaaaggatatcacagacatcattatagctttgtgtggatgccactcttttctcccccagggggaatggcatcttcgcccttatagcaaattaggaaatgaagggcttcatccccgttagaggaaacgtatacgctgttgaataggttttaagaagggggaggagccaggcgcggtggctcacgcctgtaatcccagcgctttgggaggctgagatgggcagatcacaaggtcaagagatcgagaccatcctggccaacatggtgaaagcccatctctactaaaaatacaaaaaattagcctggtgtggtggcaggtgcctgtagtctcagctactcaggaggctgaggtaggagaattgcttgaacccaggaggcagaggttgcggtgagctgagatcgcgccactgcactccagcctgggcgacagagtgagactccacctcaaacaaaaaacaaacaaaaaaaaaatggggagggagggtgaaaagcaagacctgagggccttggagacagtaagaagctggggccttcctggtgtctctgaagtggccgtgcagtcagcatccatatgcctgcttgtcttgcccagcaaagcacctggcaggtgcatgtctccatggtgatgcagcccgttctgtcaaatattactgagctttcaaagggtggaaaaaccagctaagcagaaaatttgagcctttctgctagaccagggaggctgaattggaattttgattttcttgccccccgcccaccgttagaaatggttgaccccatcatctaggatagcctgagctttctgccctttcaagctgaaaagagagaccagcaacggcccatatacctaaagaatctgtttggctcctccatgacattcccctccctcacacctggggtttccccctctgcccacagtctgttcttggaggaggctcctgatgcagtcctctccggcctcacagagggaaatcatgtgcagtgattcacagacattatggttcacaaacccctttcacatgctctgtgaggtaggtttatgacctctgcattcctgctgaggaaacaagctcaggaaaatttagtggcttgtataagatttacaaaaaatgagaaagcagagctgggactaagaggtcatagctctcactccaagacaagagttattttcagttctcttcagcgaatgtgtctgctgagagccaagcaggttggcctcctctcggaagcctcctgctagcagatgctcggcccccttcccttcattcccccagcgctttgctcacacctctcacgctctaggcggctgttgatgtgactctgttcctaggctgtgagtctgtcaatggcagggacaatgtctgattcaactccaactaccacatgcctaccaccataaatgtcaaatgaaggaatgaactcggggctagacccttactgctgtcataccagcataaggagagtactctagtccttgtggcactccgtatagaaaaaaaacaacaacatcattttcttgacacattatccccactgcacacttgctgtgttcaatgaaaaaagaagcaggctttaggtgttgtaggacattttagtgggaaagatttaatgccctggaataatatctgcctcatcaagttcacatcagaaaatcagacaaaccagaatatggtcttttttctgtttttgtcttaacggctttggaattgtggtcagtggaaacagcatagtttgtagtaaaaatattcctggctagccaagtgacacatctggttagtcaaggacaaggaagagaacaaactctttcattcctcagcagctcaggagaaggcatctgggtgggtctgcccatgagaatgtttgtgaagtgtcatttgagaaactctagcagagcaaggatgatgaatttcataactgaaatcaggaatcaggtccagaataaagtttggacaattttataaaattgtggagtagacgagatcctacatgaggacaattattctatccctcccctgctctttaggacaagactgaaattatcctagaaaatttactcactttaaaaatctctagaataggaatttcttaaaactttcctggatgagccttttaaatacctcacaaactttatgggaagaaaagttttccttctttctaacccaaatccttcttgctgaaattcaaatccattccctcttgtttgaggatcagccaaggatttaatgccttgatcaatttgcatcaaaacatgcaataaacttattggttttttaagacgtgtaaagtacacctgttagcactccttgttgcaaataaatacccaactcacagtaactaaaaccataaaagaaactctttgatacccataagtgaaaaatacagaagtaagctgagccttggcatcttaataatgtcaataagggcctgtcttatttcctattatctgctctgcttaccatagtgtcagagtcatcctgaagctatttccctcatagtggcaaaatagctgcagcagttccacacctcacaggcttataccacaccatcccttctgcgatagtgtggatgtttgtcccctccaagcctcatgttgaaatttgatccacaatgctagaggtgggggctaataggaggtgctgcaatcatgggggcagatcccttatgaatagattaatgccctccctcaagggcaagtgtattcttactctattagttccctcaagagctggttgtttaaaaaggacccagcacctccccatattctctcttatttcctctctcattatgagatctctgcacaggccaggtcccctttaccttccaacatgagtagaagctgcctgaggccctcgtcatatgcccatgcccaatctttaattttccagccatcagaatcataaaccaaataaacctttttttctatataaattacctagcctcaaatactctgttatcacaacacaaatggactaagacaccttctaagcaacaggtgctaaaactcccccgatgagacttgcttgggttatgtacccacacttgacccaggaaatgtaatatacccgattggtttgatttaatcagggctcaccctggacctggtaatagggggtcagctttccagcagcacttgggcttagtgggaaagaagacgaaaatggaattgaaatcttggtactgttgcaaaggggatgggtaagatggacaattgaatactcggtaattgtgcaaacagaaatgcacctaaggttaaaaagcatggtatgatttgttttgcatataagacatctccccagacctgtggcttgtccacttagagatgggttttataatcctcatgtatcagtgtttcctacccttccctgatgatgagaatcacttggagcatttgttaaagccatagcttcttaggttcctcccttggagcttctattcgatgggtcttggatagggcctgggaatttttaattggaaacattctccaagtgatgcttatgagacaacgtcccatacacaaccaactccagtgcatgctctttctactcctaaaagcaggcaggtacactgtggctgcaaagatctttgggatgaggaggggcatgctcaaatcatgacagttcagtctaaaaaagactttaggaaggtcttttcagacttggtcattgtgagtattggtctgagtctgtaagtggtgaagaaaacaattgctaatccttattgagtacttaatctgtgaaggatgctgagctgagtgctttgcatgaattatcttctgtaactgatgcatttccttttctggaggatttttaggtaaagcagggactctcaaccttctaaaacattcttattaagcactgacacccttatcatgtataaaaatcaaaatctcccacaataaccatttacatatccattattgagaaaatatataatatcaagaagtgacttttgtcaaagttttcttttgttgaaattatggaaaccagcatgagctaccatgatcaatttttaatgtattggaaagacttctaggatactcagaggcaattctgggaggtaaaaagccagagctggagagcagttagagtctgactgtgcattgcctcagtttctacttcatgtacttgcaacactcttttccccctgcatccccacttcccatgctgaaattggggtgagcaggaggtggtgccatcccgcagttcccagttacatattatcacagggccactcacctgcacccaaaagctatctttgaattccaatttcaagtttctaaaagggaggctgtagttggctgagattaggcaaggcgtctgccttggatccaattcactgagactggggagaaggggctcatgtggcaaaaacatgggccaggaaccaggggccagtttctattggggggacgagcttagttctcacagaaaagaagtctttgaaagctgaagagaagcctcccacaaggctattgatacaatgagagtgaatcaatagctcttggatttttattttattcatcccagaagcatctggaaacatttgaaaaattgtggtgctggatgtgctcgtggcttcctagacctactgcagtaacccttcagccctcccagggtccaaggccagcacgtgggagccagcgtgttagaggaacaggaataaaccaggtgattcttaggagtccttgacctctctggttacatccttggaaagaaatggggcagataatgcttcacctgctagaagtgattggatgaagggcaacagatttcctccctggcctctcccagggccctcccaaaggcctacctcctccctccctggcctgcctcagagcaggcccagccactgagcctgcctagctggtagtaacatttcagtctcactggcagctgactgcccacttcctggcagctccaaactgcaggagactaataaaacaagacctaacgaatggatggcactgcagtaatagtgaacgctcagatttattcttgttaataatttcagtggagtaggccaaagggactctcatcagtataactaggagataaaattctgatgaatgaagcaataccttgttgcttaaggaatagtgcataattaagaggattgttgaccctaattgaaatgatgttgccaaggtaagccaaatagcacttctggaccagagagggagttttctgcccaggacagactctcctacaagcagagcagctaactttgattctggtaacgttaagaaatgagctttgggccaggcgcggtggctcacacctgtaatcccagcactttgggaggccgaggcgggcggatcacgaggtcaggagatcgagaccatcccggctaaaacggtgaaaccccgtctctactaaaaatacaaaaaattagccgggcgtagtggcgggcgcctgaagtcccagctacttgggaggctgaggcaggagaatggcgtgaacccgggaggcggagcttgcagtgagccgagatcccgccactgcactccagcctgggccacagagcgagactccgtctcaaaaaaaaaaaaaaaaataaataacctgcccacaataagtaatttaaaatatagtagcaaatcttaaaattcaaggaatgctaagatgtactgatttttttccaccatgaggactttgacgtatcttttagaaatatctaattcttttaaaggtctggggcacatcttaagcatatttcagggctcctcttgggtaaactgtgatgagtcagagaaagaggcaggaccgacaaccaacacacctgagttccaaccctggctctgcgtctcaagcagctctggaaccttgggcaagtcacttaacctttctggctctcagaaaagtcatttggaaaatggtggttcctcaataggcagcagtaagaatcaaatgaaatgtcaaagtgctttgtaaacttagaaacactgtacaaatataaaaggaaggccctgtcactggagcattcattatgcaagggcctgaaatatggtatggcacaagatggtgaaggtttcatatcgcaaaaatactcacacattggtccctactccaaacctcctttcaattaacacaagcactccttcttgccagaagcacaggtctgtaccttcctgatggtctgatacccacaatatctgaccttatttgcaaatgctgtgcaaatatatggcaaaatgaaattgcaaatctggtaattaatgagggatttcatgaggtcagtgaaagtgatgttggaggctgcattaattcaggcagctaagccactgaccaagaagtatgggcagaggtagccaattcccaaataatgaaagaaaaaaagtaaggttagtgatgcttcaaaaaaaaatgattttaatgtcaaagacttaaaagaagctcttgcagaaaatgataaaaattcaaaaatacttgaattttataaaaattattctttcagggattgtgctacaaaagttaaatgcgaagaatttggtatagacaatcataattttgttggaaaattttcacatataaagtttattgtattcattctttaagaattagctgatagttgatattacaacttaaattttgttcaacataaaataagcttattttatagtttttagttttattttctaggcaaaatcataaacaaaacatttgttgtgcttgtttgtttattttttgcttttgggttttgtcgttgttttcgctatttaccacagtctttttggtcaatgttttaggtggaatcacttccgatgtgaagcagtctcagataatgaggaacttttatagttatttaattattattgctgattttattatttcccagtacccttcaatggaaatggtgttgacagtctcctcaagcccaagagagggaaaggagtgaactcccaagccttttggaaatgggaaggtacaagagctgctctttcagagagaaagccaacatggcttggaaaccatacagtgagaaatgagcccaattttctaggcaggtctgaattttctaggcagcccaattttcttggcatgccaggccggtgcagtgtgttgtgggagaggagcatggcagagactggactgcagggcctctgtacctcaccgaccacaggctggactaggccactccgacttgccaggcacaacgcacatccccgtcctctccaatggctccatttctccctccccaaaactgagggggaccaaaccttaatcaaaagagttgaagtttcagaacacccttgatagaaccttcacagagaacacagatgctgttgtcagtgcccttagaaacaatagggcccaccttaccagcaggttgcttgaggaattcaacatgccagagtcctttgtactctgtccctccaggtgctgggccaccattcagagaaaatgggcagctggaagataagattgcagggtgctgctaggcagacctgggttcaaatcataattctgccaccttacttgttatgcaacctcaggtaagttacccaaaccgtctaagcttgttttcccttctgtaaaatggaaaagggttccctataggtctacctcatggagcttggggtgtgtcctaggtcagattcctcagaagaagatcctgagatgaggattcaaatgcatggggtttatttaggacatgctcctgctaagggagttggggaagtgggcagggaccgaatgaaaccaagcacgatacagcttcccagcctgaggccacggggcactctggagaatgttattcctcagagtttgtcctgactcacacaagcgagcttggcttccaaactcctgcactggtcgtttattggctgacggctaggatgacccagatactctggctggctggctgcatggtgggcaaagaggcccaagaagcgctcaaacaaaatcacaggtgtgaaccattaggagcattattatggtaaaaaagacccaaggatctgggcagagcaggaatggtgtctgctacagcactggttaaatgacataatggtaaaccactcagcacagtgcctagtgcagaggaggcatggcatgtgtgccatgccagctcttattgctgctggaattattaataatacgattgtcatccttctaggccctctgcatcagggaatctgtactatgggccacagccaaggagctggcagtcgaagcctccacgtgggtagatcgcacactttaacggacagcaaagaaggggcactaacatttattgaacacttactgttcaaatgtcaggcactgtgctgagcactttacaagagctgtcttatctaatccttataacagccccataagatggaattattatttttattgttatagctaaagaaactcatccagaaaatcaaaataaattgcccaaacacagctaaaaagcaatagagccaggattcaactgcagtcatgtctaggttctaaagcaatattccttctgcataagcttcagaggctgcctctaaaagatgatgtggcagagcctgcctgttgcctgcccagcatattctgcacagcaatgtgcctagctcaaataatacatacatcagcttcccttgcaattaaggatggccaataaaagaaagtaaagtcatctggtggggctcctttaaataaaatggattccatcaggaggcattctttttgttcttccccatccttctcctgcttagaagacagatgtgatggctggtgcaccaaaagccatcatgggccatggaagctagaaacctatggatgaggtctgaatttatctaagacttatttatatgagagaaaacaaacctttatattactattacttaagcctattatttctggtttctgcttctagcagctagacctaatcctaacagacacagatcacatgatatttatgatctcctttaaggactttactatcttgaatcaaagtaaattatccacttgcccctggccctctgtcctggaaacatgttgatgtatctccatgctacaaaattgaacccataacgtcccaacgtgttgctttataaacatcaacagataataacaataataaactatgagtggtctgggctttcagaatttccagggcaggtatgatttcttaccttttgaaactgaagaaactgggacacatgctgagagacaaagccctgatctgacagtgttctctgagaccccggaatcactacgactggcactttgacatccatgcctccccacacattcctcaaaggagctgcgcctgccttctcatctgggaagcaatggcattttgccctgtatcttgtagccctttaagtgtcccactattcggtgacttgtttttctaactgcagtcccaggaaacagtgcatgactgaaagcctgacaaggacttcaatctatttcttgccacttgcaggaagagttgatgagaagcttcaatcgatagcagaatctcccagtctggagcacagcagaggacttacatagccagggatggtttgtcaaagcaaatttcacatgcaactgattccatcaccctgggactctggcggaataaataatcaccatacacattttgttagctatgcctcgttagagatggattttaggaagtggcatcctgaaggctgcttatctgtcagtgctcctttaagcatggtaagctttccagattggcttttctagaaaattagaccattgccatggccaggtgccacctgtcatggttactggcattgtgggagccaaagggagggatataaaggcctgagctcaccttcagaaaaagtgctggcagaatgctgggaagacatttccttgcagagtgaaaacttgatcagatctcttgccaagaaggctcttgacttgagcatcaaagaattccagcttcaagtcacagtgtatttctacaactgtctcccacatctctcttaccacacttattctatcttgagttggatcccactgaatggaatgttggatggaccatccctatgattctgcccggttttctgtgtttctatgattacaagggatgtggcctggccaccatggatgttccaattgcatgtgatgttccaattgcattgaatttgcgtaccaagtgtattgtgtaccaggtgctgtattttgtctgggaaatagagggctcagtgaccagtccctgtccttgagtggtgggaccctagggacaacagggcccctaacaacatccattcacacaaaggtcccagggtgtggtttggggattttatttttaatctaatttggcacctagcatatcatggagccacaatctgcattcttaattttaaagcctatatctcttttatctctgtgtactccttaacattttttctgctctaattcttatatcttatacagtcttgtttccgaggccacacaagcctcaagaaaaataaagctctgggactaattaataaggttgctgactctggactccacccaattttgttaacaggctaactaccccttacctcacattcatgtcacatgccccacatctactttgtgtcacacggacacctctgtaggccctaaaccactcctatatcatgtcaaccatatttaaatatgcccatagccttcatttagagacacataggcagaagaagagagttacagagttctatacatacttatctatattatatattattctacattgttttgctataaattttttgaaaggatgttcaattttcatacaattgagtttgtgaagaataaattattttatttttatgatccaagcatttcatatttacctatagctatatgagacctatacataatccattattacatgaatggcctaatgttacattttgaaaacacctaattattcatttattaattttggctttgaaattttctttatgtattaatagttaataaatatttttacaatacctgaaaaatttataggcatctgatatgttgacctacgaataaacaactctgttcttctccctctactcccagcattacctcagtcaatcccaaattccctttgtaatggatcccaaaaacttcctgctcccatatccttgcaactagctagatattgctcctgggttcctatttctgttgcactgggttcagtggttacttgagatgaccacacccccagtgagctctttattctcttaaggagtaaggctccctcttacggagtttctatcaagtttcctaaccattaggccacaagattactcttgtggcttctccatgtgccattttaccccctgccatagaacatgtgtctcaaaagggacaccaggacctaactctcccctacactgggatgaattcctgacccccacaggacagccttcacctccttaccttgcatcataagtcaagcccagcatctcgtggtctgactccaaataccaatgcacttattctccaaagagtctggaatcttacaaatctgtcttggcatcccagagtgaccccatactcaccttctgataacactttacaccctccaaagaatctttatgcaagataaaagatgtttgactcagaaagatgttctctcctaaggatattttgactcctaagaataataccattaaaaccaaaattatgtcataatgaatacatttttgtactgaaaggattttctggaaaaaactccattaagtccatttgactccttgatcaaccttcttaaaatagcctagttaaatcctctttaatttttcccattttcattcatattttatttcacagaagttatttgattgggattaattttttcctgtgtcagttttatataaagctttgatgcattactcaattggtttatttatatcaaatattatggttgtaacttttgcccttgaaaacttactatatagacattgttctacaaagttcaatattcccaagtcagactgcacagattagattttaactactaaaggctttaaattctgttgatcatttctaccagtgatattcactatataaaaaagctgagaatggtgtctctttcacagcaaagctacacactcatgtccttagttagatcttccagagtaggcctttcatttatggctggattgtagtacagcgagtgaataaggcatgagctctggaattgaactgtctgggttaacttgggcaaatatttaatttctcagttttcccatttgtgaactggggtcaatattagtacctaaaccacagggttcttgtgaggattaaagcagaattcacacaaagtgcttcacatagtacattgcatgcagtgtaagatgtgatagctcttgttattactccaaccaccttaaaaattctctgttatctattactacagttaacaaaccagcccaaaacctgatggcttaaaataacagcaatttatcactcaataatatttaattgtatgggtacaacacattttgcttatctgttcatcagttaatggacatttagattgttttcaccttttggctatagtgaatagtgcttctatgaacattgcatacatgtatttgagtgcaaaaagaaatgaagtagcgatatatgctacaacatggatgaacactgaagacattatgctaagtgaaggaagccagtcacaaaagtgtctccatagagacaggaagcagatgggtggttgccaggagttagagggggcagggaatgagaagtgactgcttactggatacagggtttgcttttggagtgatgaaaacgttttagaactagaaagaggtggtggttgcacaacattataaagatactaaatgccatgaattgcataccttaaaatagtgaattttctgttatggtgtatttcacctcaattttaaaaatcatcataacagcaatttattatttctcgtgactctgtaggacagctgggaggctctgctggcttcacctaggctccattcagcaggagaattggctgggagggcaggtcctctctttcacctggtctctcatcctcaagaaggccagttggagcttcaagcaaatccctgtgagcaagcacttaccaagtctctgcttgggttatgttagctgatgtcacatggaccaaaacaggacacatggctaggcccagagtcagtgtggaagaacactacacaagggcatggtatcagaaagtatgattcattgggggccattattgtgataatctctacaagcatcattctaatcatctaccccaacctgacttggtctgaaatgactcctacatcctgactaacatggaatagaaagcttgggctgcatggctttagaagagtaagatgcaagtctcaaatgtattcagagtcctcagaatgaaaggaaactcagcttctttcagcattcctttttttccagagttccccccgtatttaagttcaatgtttttgatcagagacctcttgttatgatgaatttaatctgaaacaactgaatgaagggcagtggtgatgcaacacaatgatcatcttcacagtgtccaattgtaagtgctccggagtcaccaccctgacattcctggggagttagtcctatcagaaagggctggtggcagctctattgggaggggctcccacagccagagctgcctggtagacagagtacccacagtgcccttaaagacaactgttgtttatggaagacacctgcacccactaccttactttaaccctgcaagctggtactatcatgatccccattttgcagatgaagaaagtggtaggacaggagatgcactgcccaaatgccctttctggagggaaggacttgcctccagctgtcagctccttcagagtgtgcttgccatagacagctgctttgcccaagggcatctctttcctttccgggtagcccaaatgcaacagctaacagtggcaggggtacaaagacccatgacaggacacctctgagggctgcgtatgctccacagctcccaatagggtttgctgatcaacttctccctctgtcccattctaccccctccccctacagtttacacatgttgatccataataaacactcgccacttcccagttggtgaatctgggcaagtcgctttgtcttcctgtataaagggtgtggtggaggctgtcctgcccacttcacaaagtgtcaacaagatgtagaaatgctggtgagattaaggcaaaatatgctgaccccaatatctgctttttgatccaccaacgtgccaatatcttttcttggattctcagatacactcacccctggtttcttcaaatggttatagctattgatcactatgcgctagtcactgtggtgatagtattaccatgtgctagtcactgtggtgatagtattactcataaaaatgctatgaagtaggcactatcagtagtagatttgttattttctattccactgtttttagagacatttagatctggtgaaatctgttaagcaattctagaagtgttggtgtgcaatattgggagtaggacatggggagagctgaattgccctgtgcatagaggggaaagaatttggcagtctgagaaatctaggaggacaggagtaaagaaagatgaggaaaaagaacagtgaatgagataataagctgcttgttcagtatccccagattgtctgtaaggtatattaagcttgcaaagtgcttgctatgagtgggttttgtggaaatcggggcaggagctgagttttgagtgtgggctgatggaggcaaaacaggctacagcaccaattggtagctgggacagaggactccacatgagcataagccctattgctggagaaggatttgggttcccctaaactatggcctataggtctgagtccgaggcattgctttcaaaatcacacgatattttgtgtgacacaagaggtcctgagcctttatctggggtaggtatgattatggccgtattaaagatcaagaaactggccctcagaaaggtcaagctatttacccaaagtcatcagcaatcagtgctggggccaagattcaaacccgtatctgtcttgttacaaagctggcgttcccatggctaccccaacaccatccttttcgttcctctgccaccaccaccactctgccccaggcccaccatactctgccattctcacacagccaagcatggttttcctgccaggtcccagcacagaccaaaaggtggagccaccagcccgcaagagaccgtcactggggttcagaggcaggagggccaagaagacaagtgccacggcacctcctgtggcttcacccttcacctccacttctagtcagccccttgccctccccacctacagccacatgcctcccatgcaagcaggcagaaaatccccccagaaaagaggcaggtggaaagggtggcaccttcttccacgacaaaggaatctcatggtgggcaccccggatgcactgcagcaggaatcctttaacaatggaaccaagagcaagggctccatggtgggccagactcccaaacagaagacggagagcccaggcactgccaaaaccacacgccacaagagggaccactctccaccacttcctctcaaataaacagcagcgcagcactgcccagggccggggctacagcacaagggctgccaaagcttccattaggaagcccctcttttctgtgctgaaaatatagctttcagagtttattctgggttcagacccctgcgtcatcttgggagccggtttcaaactgacttttccttcatttagattctccagggataaagaactccctcactacccactcccccagcacacagccttcgccaaataaccgaacaaaactcctaattgtttaaagtggttttacttttcgttttggatttttttttctttttttattttttctgtgttatggaaatcagagaacaaatcgctcctctaggtagggctggagactggactgctccattgtttacaggtgtgtatgtggttggggtgagacgcgggaggacctcacagtgcccctcctgcacggcaggaaacaggacacaaatgccctagccatggggccagctgagccccctcaaccagctgaaggggcctatagctttctgtaatgctgcctgttggttctccagctaactcccagcaggagaaggaggagggggagggggaaggggaggggagggggagggagaggggagggggaggggagggggagggggagacttctctgttgaaggcctcagtccagagtcctgggctgcccctgctggccccacattctctttgagcatcactttgtcaccccatcctcccacagctggctggaatacagagctaggcttgaccacagacaagggaaacggaggcgctcaaagggccgagataactgtgcacagtcccctgggtctccgccttggcacaggaaaagtctcccttttctgggtggtctctgtttccttctgctctaaacctcatcctcagagcaaagctttccctcttcctttctccctctggcccaaggctgggcaccccctctggactcctttgattgctaaaggaggaaactgtcttttctgcttggacccaggctccccacttggacttgtgggtggaattatctggacacccacttctcccaacctgattaacccatttatgtcccgccgtgagggctctccttttctcttatcccacatcaaagtctggacacaccaagcccctaaattttgagcaatgcatctaaaattctcataattcccttgtacccatctcctctgtcaccacagcccagcccaacccggagggaagtgcaccgaaccaccaccaccaagcacagtccatctctttctctcactcatgttcttggaatgtgtttgtgtggagcatttctcactaacaatcttttccccggtgttatacattcattctagttctgtcctgctctgtccagaggtgaaccctgccatctctctgagcctcggacacttcacctatatggccagtcttacatccatccctcatgtggcaccgtccagggctggaagatgcccctgcacctgtgtgtccctctgccacccacattcacaaggcatatcttgtcgtgggttatccccaggggaacagacccattatgcagagagtgaaaaactcccaagcctccctcaagtatgaaccctgtggctcccaggaaaatcccatccctgattctcgaggtgccagcctgtatcaccggacactgtgcctctgcccctgaggaagccccttcatctgtcagtagtggccgttagcctcactttttggacttccctgcctcacatgcccacagacagcaaccactatctggattatctgtagccaagaggcacatcagaaatacagagggaaaataccaaaaccttaagaaaagaataatagtaattaaacaaggtttgatgccttgagagttgaaagcatgtgtatgtcacattgaagctgcaaccaaatttctatcatataaagactgtgctactgtgtagaaaggcagggtagggagttgctgatgctcgatgcctgaccctggcccggatcctcataaataagtgtttttggttcctgtccctcccacttccttattaacaaggatgacctgggaatggagtgcttcttcagtgggcatctattgttttggcctgcccagcatccatccccccttcctctggtactagcaccatgatttattttcatttggaaaaaaatcatccctttcctattgcctgttcctgtagctcgggtggggctgacccctttcctggctccagggctgggcagtgacccagttcttagcaattgactcaagtgtttataatcaactaataagccaagagtcaacctcaggactttttttttttttcgctggtactggcaaggaagaaatactttcatgctttattagggttactgaaagggtaagatttgcaggcctagagcaccaagacgccatcttgccacagggaggaaagggtctgcccctggatcaagtcgtatctgaaacccagactgctcctggacttttcaattctatacataatttgagccttgttttttttttttttttataacttccatctaactccaaacttttattcctcttttacagattaaaaaaaaaaaacttagagaagctaagtaaccttccaggttccacacgctagctagtagctctgagttttgatatgaacacaatccaaacttttttttttttttttttttttttgagatggagtctcactctgtcacctgggctggagtgcagtggcgcaatctcggctcactgtaacctctgcctcctgggttcaagcaattctcctgactcagcctcccaagtagctgggattacaggcacctgccactacacccagctaaatttttgtatttttagtacagacagggtttcactgtgttagccaggctggtctcaaacttctgacctcatgattcacccacctcggtctcccaaagtgctgggattacaggtgtgaaccaccgcacccggcctgattccaagtcttagctgtcatactctacaaccttccattatattccttcccttcactctatgctccagacccaactctagtaaacatttaacagacaaccattctggaacatgtggtgtcaccatcaggtacccaaagccagtgactccagccaggcttacttgtaccactgtccatatccactgtgctttcttggttccaactggagtttcagtttgggttgtgaaggccagggctttcaaacacagacttcaagccagctataaggtgagcatgttctgcaatctgcattttaccatttttccttagccaagagatccacatcattttccaccaattgcatgttgacccagaagctactggagcactcagggaatgtggactacctatggatgactgtttggcagaactgtctctttttaagctggcttgggtcaccatggttccagctcaactagggccgaggagcatttaaaaataccaaacaagttgaggtgagacatcaaaacccttacatccaactccaattagaacaatcccatgaaaagagaacctgagaaatgcacaggccataccatgttgggaatgactctccctgttttcccctagcccgcaaccaagaagaggctgagataaataaggtaagcttttctgggaggataatataacagaagtccaataacaaaaagaacagccttccaaatggtgatctttagcaaagttactgggctatggggaaagttctccatctggaggtctagagcaatcactatttggggggatttttggtttcaaatgaggacaactactcctagccaaattgttatagaatcaacacacaattatcagcaaagtacgtgcttgtgtttaatcctctcacaggattattctagaaactggggctagattgagaagactgtctttaatcagaggccaaactaaagttttggctgctgctgtagcattttgcattattcagatgcctcaaatgtaactgttgaaataaatgttcatgcttaatttgaatgcaaggtgacaccacttgattttcatgctgcttagatccacagggaatccatcaaaaaagtcaatcatacatggtaaaactaccagcgctgatacttaaattcatagctggttcacatctcttgccgaagcaccaaatactttttctaggaagccaacaatatagatttaacacctaaaaataattttcttggccaaaaacagcctccaaatcattgcgaaatattaatagatgtattttatttggaaagaaataacagaaaatataaaattaatcccattgatcaaaaagaatttaaagtgcttccactgaatcatgagtaagacaaagaaactcacaaaatcttccaagaagaatctactgtattgccctatgacctcttggtcatatgctggtttttgttaaatttttatttcatgttttcattgaactgttcgtatatacatatatgtatatacatatatatatacttacacatatctatatattaatctatctatctatctatctatctacctattctatctatctactcttcccatttagatgaaatagtaagtgcaagcctgtattctacaggtcctttgaccctatggtgcctaacgcatgcctgagatcacagaaggtactaaacaagcaagctgtctgaatcgatgaataaatgttgacttctcccttctccaaggtattctagcaatggtggtcatggagtctgatgaacccctggccttagaattgtgtggtgagtgcttatctaacagcaatgttccttcttccttgcagttcccagggaaacagtcctggtcagcccaagccagtcatggcaataacagtcccctttgccagcaatttgtctaagggtgaagactcatttctggccaaaaagatagaaagcaaagtccattgggaggcttcaggaaatattttcctccccagtaaaagagatagggttctaggggagaagtccttgtttgctccctttcctaactttcctgttttaaacactgtatttggggatatgatgcctggaacagaagcagtcatctcagggacatgagacaagtttgaggacaaaaagtctttgccaaatccaaagatgttggaggggaaggactggaaggatggaaagaatctggaagcttgataagtgagcagctaaaacaaagcatgggatcacctacctccagattccttattacaaaaatagtgtctgtccttatttctgggcctaagtcagggtttctgttacttgcaactgaaagcattctaactgaatcatacacccttgttaaaaacaggagtaattgtgtctcccctcttctaggtatgttataattgagagaacagaggtttgggagccaaacagactccagtcagacagaattctggctgagtaaccctgagcaagttccttaatcttcaaagcttcagtgtaattaactataaaatgtaggtaacaatgaagacttcataagcttgctattgtaaaaaaataaaataacaactgtatataagtcacttaggcatgcagtagctgctcagtgttaactccttacttttttactttccatataatccctgtgtggagtagaagggtcaattttttgtgaaggggaaagcacactcccatggtaatatcaagaaaccttgattttatttttcatcatctttcttattccaagacaagacaaatgatagggactgctgtccatgtgggaggctggagttcaaagaacagcttctaatcagcaggcctgcctacgtggcctgtacacaaacaaatccctcatttaggagctgttcttgccttttgttgagcctgatgctatctgtgactcagcctgatcaaaccatctacttaatgcctctattcagaaaggcctccacctgctgggctgctttgggccaggagggtctctgtttcccacaggctgcccgcagctgggagcctttaaaatgtggacccaattacctcagtgggcagtgatccccaagtgagtgtgcatcataccccggcagcctcaggatggtgtgggtctgaggacaagcagcaggcagtcaaagctggcttgctggccactctcatggccttcctggacacacacctagatatggcccatgcacacacacaccctttccacactttcctccctggtgattaggcacagtgatcgtcaccccctggagagctgagaacctatctatagtcacacactgtccttcctccttcctgaaggcatgaggacgatgttagcctaactcacaaactcatactgcaaacctccaccagagaggcagtgcacaataatggttaagagcctctacccctagttccaggaattacaacttacataaccttgggcaagtcacctaaaccctcttgggctcttttatctcatctggaaaatgagtatgaaaatatatttgttttgataatgtgtataacgtgcttagcactgtccttagcatgtggtacccactcaataaaatggactctcccagtccccttgtatattaggaagggatcatctcctcctgccaaaggacaaccccaaggcatggcccacccaacctgccatcttaattggctcataagatcaacatttgcactagtccaaaatatttgtcagatacctcctatgtgtgagcatttgggatccagcagcaaggatctttcagaggttacagtctaagggaagaaacaaactcagagacaaagtcatagtcatgaatcataaatcctatcaaggaaaagagggagctgtgagaaggagtacaaagcgagcagcaggagtgggagtatcattttactgaaagtcagataagacctcttgctgagagaatggcatgtaagcttatagggactcagtgtccctcacataaatgctagaaggataataaattgtcctcaggccagaggtggcactagtagcaagacaggttctcaaagcacaagatgaagagatctcctgatatggtggggccccacaaccttgcttccttagggacaatctgccctgtaatcataacctcctccagaatgtgcctgggttcaaatgcctcaccttgcaccctcgtccccctcttaatgccctgaattatctcataaatcatctagtcccacagcacttggcaaagcagcaccaggctttgatgaccatattttccacatagtcttggaattcaggctatttagtattgaagctcaaagtaattttcccctagatttattcactctgttccactctgcaggtttaacctcctgtccaggttgcttttcagcgaaaccacttttagagattgtttttgttctaccccaattttctggagtcatttaaattcaagggacctcttaggagattgcagattatatatacatgtctacgtataaagacagagaaagatccctgggaaagtcattgtccagaatcacactggctttgcttttccttgctttcaattacagactcaggtgctgtggaacattactaaagcacagtgtacatggtacatttccaacatttttcatttgctttcctgctctcttccatttccctacttgatttccaatgtgagagtgatttggtgccactgttttttgcccaaagctttctgcaggtaatagcttccctctcccaccccttttaatccatttctattaggttcatgcttctccttcacttgaagttattcccaatctctgctcctgagctcttctaacctctctgtagtttgtcactgataccttcatcaatttctaaggaccattcatttgcattcattcagtgcttaatgagcacctactatgtgtaggccactgggctgtgggaatacaaaaatgattaacacatactgttttattcttctgtgatctaaggatcacataatctctggtgggagcaggcaggtaaacaggtaagtacaagtcattacatcagttactgtagattgaagtgtggacaaaatattgcagaaataaagaaaaagggaaggattaattcagccttgaaagattaaaaataacagcacagaacaagtatatctgagctgtatgtgaaagggctttcttgctgagtaaacagcttgtgtaaatatgagtgttcagagaaccagatatggttcacactggctggagcacagtacagggtggcaaggggagatagttagagacaaagatgagaggagtttggtataggttggttagggccaaaatacaggtcaactgaacagttgactgtaacttactgtaaatattaaataaataaaaatccacacacttgtagtgacagtaaagaaatcatgcccttatttgagaccagtggaggttattataccgacttctgatgctgaaaattggtgattaaagggaacgtattaagtctttacactgcctttttaggagaaaacgtagttctttgccagaagatgagggaaagacctcccttataccagaatgccaactaaagtacgtaaaaagaatgacaggattataaaatcaccattttgcaaccaacggtgaaatacctgacttgggcaaaaaccatcaatggctgctaaaaccttgggatgaagttttggggaacataatattctctcagtaacagagtaccatctagaaattaccagctaactggaaagggaaaatgcatctttacaaaagagagacatggtgatcaccatcttaaccaaaagatcaaacttttggcacaaccgtaggacaacctctcattgtgcaccttctgatgtgacatatataaagtacacagcttcacttaggtagtatcttcggtgtttcaactgcatctttagttacaaaaaaaaaaggggatagaggaaaaagttaaaaccaagaagaagcaattggacaaatctagagtatggggcatcctacaagacaactgccctaacttcttcagaaagttaatgtcacgagtgggaaaatttaaaaagactaaagagatataacagtcaaatggaatgcctgaatattattaaatcctgattgtaaaactaacatggtaagataaacttggaaacaatagagacatttaaagacatttaaatatggactggatactagatggtatttgggaaccaatttctagtcttataatgatcttgtgattatgtgggaaaatatctttttttttttttttgagacagagtctcgctctgtcacccaggctggagtgcagcagcatgatctcagcatactgcaacccctgcctctcgggttcaagtgattgtcctgcctcagcctcccaagtagctgggattacaggcgtccaccaccacgccccgctagtatccttatttttaatgagatgcacactgagtatttagggatgaagcatcacgcaactaattcaaatggttcagcaaaataaacatatatacacacacatagacaaactaaatatgtctgaaagttcacaatcactgaacttaagttgtaggtatacaggtggattgtacttttctgaatatttgtaagttttcataataaggaagtctggaagaaacaaaaggaaagggcacataatggagggcttgttatgagctccttgggattctggatcctactgctgaaggttttaaccagtgcttgacatgatcaaattgacattttagaaagctcattgatgtattgcatttactcaactagcatttattgatcacccacatccaatgttgagtgaaccctgaggtaggtgctgtgggagacatgaaaaccaaaaaggcatcgtctggccagaaaagcacttaccatgcaatagaggagatgagacacaaaacactgagcacaaggtaaagctttcttgtcacaaggggtaactgggagacctggggggaaaaggcagatgcacggtgcctccaggtgttagctggtgttccacgcccacaaaattatctcagaaagcataaaactacaggtgactgaaaatcacctgtcagctctagccccttgaactttccttatttctagatggcagaaccataaccccgagagatactggaaaatgcaagatttccttgaggtagggtgtaggaacgtgactcatttctggcccaagggacctgacttaggtctcctgaaatccaccagggactactgacaaagatcttctttcctgataaaaacagagacatgtaagaaggacccctcctccccctttcttcctgcctctgagtgcatgtgggtgaggttgtgatgcttggagctggggaattgtgaggggaaagccaagggaaagaaagaaaagatggcagactcagatccctaatatcattgagccgctgaagcctacaacctgacaacctcccattaccagacttcttcttatagaagcaaaatttccccctttccaacgaatttatcagcagttgttgatatatatggcccaaaaccgcactcagccctcatctgcaagcatactgtgtctagagccaatcctaacctttgaacaacgcagttgaaggaagcctcacccaccaatgagtcaagtcggtcctgctcctagttgttatgaccacatgcatgctgtagttcaggatggtaaagaagtttcacattcatatgccaactcagattgatgggcagcaactggataatccgctgtgcagaaagttaaatacaggttctgtgcaaagaagtgtctagattcatagtgccagacatctgccctgggccacatgcttaccgtcccatggatggatggaacttggaatcagaagacccaagtttgagtcctggctctactacttttgtgattttggtcatttaacctctttgagccttcttatggcatagtagttataatcaagataatataagtgaatgtgctttgtaaaccatgaagtgttggtcacacagatgatagctactgtcttatatttgtcaaacctcagctgaggaccaggttgacaggatggaggaagaggaggaattcaagactcgagcgctggatggccagtagctggacacctgacaggaggttctaaggccagagtttcaggtgaaagtgaatgagtagtagtgagttgtggccctgaacagtgaaatatagttggagaagattccaaaagcaggagtgaagacactaagggcaaataaagatagaaatcatggactggatagcctacgctgtacttttttattgttctaacacctgagggatatgaccctacccatcagttatagtggctccccatggctggggacttttctgaatcttcagaggagcaagcgaatttgccaaatttccctccctaggtggttctaacgtgcctccttagggcagtgtttctctttcctctgttgcaaaccactaaagtagactagaatgaagaagcccaaagtgcaagaagaaatagacagtccaaagctggtagagatctttggtaagctcagggtggcaggaccattttatttttctctcctccctcacctatggcctagcacaaacctaccacatttccaaaaagcccaggaggtaacagtgaaaaaatcagaagagggctttttataataaaagtcaaagctaaaaggggggccaaggactcttgactagaatgacccaagaggccctccctctccaggttatggaaggcctgagtcccttgtgaagtctgacctaaaggccaaaggtgagggaggcttcctttagccccctcttcaacccacatggacacctaaagcattcaccagccccatgcaggaaaatggaaaaaaagattgactgtcaaccccaggtgaaagctaagaagagactgaagcctatggcaggtgggtggcggggtggagtgcaggtgggggaagaaaaattcaaagttgtatttgtccatagctgtatctccaatgtctacaccaaggactggttcatataagaggcaatgagtgaatgagcccatggagaagtagtaaatcccagattgaatgggttgtccaaggaactgaagagaggtatttgaaagagggcctggacaacagaggctctgcacccacagagaagcaagtgcataaatgaaattgaactgggcagagagcccctcccaattcataatccaagcagactctgagtgaatcctgagaggaagatcaggcctggagatgctgctctccatcccttctgcattccacatatcagaaaaactccaagggtttaaattatgtttaacatgcaaaattaggagattctacataaagatactgttgataaactgaagattattcctactcaagtcaagagctatatgtgagctggtgcattcttgaaccagactgcctgaatttaaagcctggctcattcattaccagcatgatcctgaacaatttactcaacctctttttaccccatttcttcaacccatcccctcattaagagataattatcacttgttataaggacttaatatattaatccttgtataacgcctgcaacagtgcctggcacatgatatgcctcaatacaattaactaccataacatgtgaggcacatatgtgtcaaaagaatacaagttaagatgttgtgaggggttaaattgctcctgccctcacaccaaattcatatgtggaagtcataatccctaatacttcataatgtagctgaatttagagacagggtctttaaagggtaattaaagttaaatgaggtcattagaggggccccaattcaagatgactagtatccttataagagattaggatatatatacacacagagacacacacacacacacacacacacacacacacacacacacacacacagagaccatgtaaagacagagagagaagaaagctatctataagctgagtgaggccctcagaagaaaccaaccctgctgataccttgatcttgaatttctagcctccagaactgagaaaataaatttgttgtttaagctactcagtctgtggtactttgttatggcagccccagaaaactgataagatcttcttatgaaacaaatgtggcccacttcacaaattaccaaattcaaatgccctcaggcatctgaatataaactgctttaaattcattcattcattcaacactgtagcacctactatgccctgaacactgcatgtttattaaaacccttcgtcatataagccaattttattttcttgtcagtaaccacccacttctaattttgtccattttctgctgggcagcttagtgtgccacttggttgtctgccactgcttctcctgattaatgggaaatgatccttgttatggatctgaaatgaacagcatcagagtatgtagttctcagctctggctaaacactagaatcacctgggaagttttaaaaatacctacacccagacctatcccttaccccattctgatttagttggtcttcgtgtggagctctggcagtgtttctgtaagcttcccagacaattctagtgtgcaaccaaagttgagaaccactacttaagtttaaaagggacttcaaggtcaccccccctttccactcaaagtacagttcacagatcaccagcactgtcatcatctggaaactcgttagaaatgcagaatctcaggttccatcccaaactactaaatcagaatgcatattttaacacgattcaccacacaattcagatgtactctaaaatttaagaagcactgtattcctactagaatctagatgattcatagaatctagattattctaatgggagttcaccgcttctgaatcaactagaaagcatgttaaaaactaagctacctggcttcctctcagattcatagaatctcaatctttgggtaaaaggcctagaaatcaaaattttatgtatttttgtgtagctagtcagggtctgcggtttgggaatcacttatctagggcaatgtatatattctctcagctgcccagcctctgtttaaaaaccttccaattcttttttgaaaatcagaaatataacagagatacaggtttttatttttccatcatgcatgcaaacttacaactatttatactgtttaagaacacagaaataattgcgttattaacagggtgtcaaattaccaagtagaacaaccagttactaattattttggggaggttattttcacagaacacagcaacaatttccaaattattcttccaaaaccagagttatgagaccagtacaagctgataacaatgctaatggtcacacaagtttccatgttacacagaaaaaaagattgacattctggtgaagggtctcaagtaccttaccatatcagaatttttgaaagagttttacaacagaacagtctctctcttgttttgtagatgcaagggaaaggaagcatccctctcatttctttttgagactccttgttaattcttaaaacacatttctaaggcccatctctggaacttcattagttaacattaaaagcaaaaagcagacctgatgtgattatgatagtgcaccccatcactatcaccatcaaaagagactaccaatctcccaaagtagtcacggttgcattggcatagtgtcttggattttcaataaacaatacaggtgaaaagagagagatacagatgaaaccaggttgaccatagctgataagtgatgcagctaggtgatggacacatggggtccaaggaccatcctctccacttctgtgcatgtctgaaaatgtccataacacagagcaaaaaaaaaaaaataataacaaaaaacaaaaaagcagacttgcacatctgtatcttcccattagactaaaatggggaaagtcgtaagactttaaaggcaaaatgtgcagcatatagcattcttctgcatgtacaaagccacacctagaacaaaaaaataaagcatccaaagtaacattattccgtttctggtttgtctctgtggcttataaaatctactaatgataagattggacaaaactttgggaacatcctcaactaggcatcctatttgttcataaccccttcaattctcattttccaagctagggaggtccctcccatactctatcactgagagacaggcatgctccccctgcggcttctcaagccatttctgtctgattttgcaggcccactccataccagtatcatgcctactcgacggttttgctccaaatcccccacctagcacacccttgctacagctttaagccaaggactctcttgaggaacttagaatgaggcctccctaacaaaagagaaggtagggaagaacaggtgtagatacagtccttcttacccaccctcagggataagagagggaaaggcccagctctgcttttacacccactggaaataacccggagatccaaaacagattctgcccatcccaatccccatcccccaggagaagcttgagatgctccatattggagactaaagcccactcctggggctatttgaggtagaagcaaagagagcaaaggactgctgaaagtgggaaagctggggattgaggtccagatggccagaggctaccacaaaggaggaaacagcaggaggcacttgggtcttaggaagcattaaaacaaagtcaaaacaagagtaaacactagtctatgacatggctgccttggggtttataactcaagcagatgctaggcatgaaaaggattttcaacttcagaactgtagagcaagcgcaggagacaggttcagggtttgccagcagatccacttggccttctggtttcctcaactctctttcaacctagtatgtgtgcgcagtgccaagttctcagctacctccccagctgtatgtagaaaaatgtggtttttcagttgttttctctgtggtactatttaaacaaaataaaaaagaataaggaaagaaggaaggggaaggcagaagaggaggaaaggaggctaccaggaaagggagggaggaaagaagaatgagagggaggaaatgagggatgaaggcaggcaagcaaaataagaagtataagtgacctgaagtcaagcaagcagaggcccacaaatcagaaatacctcttcccagaacccctactatggcactctgctcacatcttagacgggaataagggaagttgacaatggtatctggattctatataggcccagtcctcaccctcacctggagccacagcataatgacagtgaacacatgtccacacataccagcccgcccatcagtctggcagccagtagggttcctggaaagctggggagggtaggtgtgtgtctcatgcactggtagggggcctcggtccacaggcagttcttgaggtccttgttgaccaggaagccaactggggctgacagcaacccagacaaaacttaatggcttgatagtgacacggcatggcgcagatcttgatgaaagttcaccagtagaagggcccagaagcaagaagagacacatgatggtacagaacacatggcatactgtttcttgcccttaacttcatgcatgcccagcagtcaagtgccattctgcagaacatcaagcaggatgggtatcacagaccacaggccaaagccagaaataaagcaggtgacatctcagctggtgaccccagacccacagaacaggaagttctggctgatgactaataccatgtgcactggcttcattctgcagtggcaatggaaacgcttgcatagatgacatgcatggccagcatgaacacgaagcccagcaagtcactggccctgaaggagcagagcttgaggatgcactggtcgtcctggaggatgactcatgagtgtccatgttaaagacaagtaggaaaggccagagccaagaacaaggtccaggcaatgtagataacagggagcacacatctaaagtatgtgtgcttaacatatgaacagtccgggtgcgatcacataacatgtgacactaacgtagaaaagcaagaggctatgggaggcaaaagaacatgatcataaatgccatattcttgtaactaaagtccaaagggtctatagtacacagaggccaacatgaagagaaggcagagagccaaatatgtagtcaaccaggagcagcccagcaggaggtagcagggagacttgtgcaggatcagttggattggctcaccccaggctgagtagtctccattggctgctttcctggaccttgcctgccttctttttcctttcctttctctacacgagccccttcactcaaaaggtagaactgcaagggattgggccacaattcttcgttgattatctccacaatcttgtcagactcaatggagctgtggtttgaaaaccacccaaagaaactacggttgttttctgggtttccctggcttagggactggagatcatgccctgggagccactggattggagtagaacgagacaccacctggccagaaggaccacacccatattccttgatgagcaccttattttggaaatacgggttgcgatcgaagtagaacttgattttgtagcccaatctggcaaggccgagctcttccacttccaagctgtttaagtagctcagtacctctttctcttggctattcagaaaggatgctagctggggatggttctgaaatgcttgcccccagaagcccgggatattttggatgaggtggttcctgcgctccaagtgctgcagtcgcaactgcccaaacttcctggagagccgaaggtaggccctgtccgcctgggcgttcatgttctccagcttcagctgcacgttctccagcgtatccatgctgccttccgtcgctgggggccccgaccctgcatccctctcttccttcttttcctccccagctgacaccgaggtattctcccctgccgcccctttcttctgcctcccaccagctatgacctgaggccccctccccgcggtgctacaggtttctggggccttcttcccggcagggccacgccggtttccaacgcggggggcatttttcggccttcccacggttcccgctgttcccacgaagacagtgtctgcggccaggcgctccgagagagatgcggccttccccgggccgggcctggccgcggcctgcccgtggtcccccgcagctcgggcccgcagcgcgaggccacagtccagggggagccggcaggcggcctcctccccgagccggaggagctgcgcggacgcagcggcttccaggccaccccaccccgcgccagcctgcacctgtgccgcctgggtgtcttccccgagactctggtactgtgaagggtccgggtcgcgcggggcgtcgtccggagcagggcggactcgggctttggcgcggcctttgccccggtttttggcgcgggaggactttcgaccccgacttcggccgctcatggtggcggcggaggcagcttcaaagacacgctgtgaccctgcggctcctgacgccagctctcggtcgggaccgagcgggtctctccacggcaaccgccgacgtcacgaacgtacaactgtaccgtcgcgagaggacgtgatgcgcccggtgattggcgccgccgctgcggctgcgcaggagacgacccccgcgggcgctcccacccccatctcgcgcggactcgctttaggtctcggcgagtttctctgatatgcgctcgcgggggtgctgccatttcatctcttccgcgcgggctcatcgtgctctcagggtctcgttgaacaaggcaacgctaagagccatcaccacctgtcccccatcacctgttttctaaactaaacatcttcagctcctccagttatctcttgtggcatctgtcatgaagaaagtgctcgggcgtgtgtgtctctctttgaacacctttgctgagggatttgctctggtaccttaactccagagaacgtaaaggtggatgctataatgccgggcgtcaaagcgatttggtacgcagtaagatgatagtagaaattataaaaataatggcaactagtattttgtatcatttgtgccaggcactttactaggtgctttaaatgcattatctcaatttacaaaggaggtgttgatatcattcccattttcgagataagaaaactgcatctcagagacacccgggcacattccccaggttacacagtaagggatggaagcacaattcaaactcaagcccatgggactccgtatcctatgccttatatttggaaatggcaagtccttccagacttgttccactgtcaattactgggctggctcttaagaaatcagccttgctccttaacaaacaggcttccgtggaccacctgaccacctcttctgcctgggaacatcacccgagtcccccagctgcctcagtttacagatctggactatcactctaggtataggaccagaagtgaagacctgtattagagctcctgtaattggagtaagacaagaatgtggtgagaggtgaaattattattcagggagcagattgaggttcagaagcagagcctccacgtggcactgcagaagccctagaaacttcttacactgtgcatggaaacagccggacaacctcccccacagtcccggaggcagccctggaccacgctcttactagtgaggtaataggaccatgaacagtgaggggacctgtggctaatgtaaaaatataaagaaaaaccttttgaggtggtcttttcaggctcaaagggaacaaaaaggcccttgtaaccagctagtggagagataagcccaaaagccccgggacctcattactcaaagtgtggttgtggaccagcagcctgatatcacctgaaagcttgttaaagatgcagaatctcaggcctttccccagacctactaagtcagaatttgaattttaacaagatcctgggtgatttgtatacacccctaagtttaaggaaacaatttaaagaggaattatttttatacagatggccctattttaagccggcctaatacaagtgattcctcattttctcaaaagctctagaatagcctgcaaggccctgtatgatctggcaagtcttctatctgccactacatgagttacctctctgacctcatcttctctctcctctctcccacctctagctacactggcttccttgctgttcttaaactcactaggtaaactcctgcctcagagcctttgcactggctcttccttctaccttaaatgctctttcccaatgtggttggtggccttggccagctgccttcacactttgcttaaatgtcaccttctcaatgaccatcctatttagaattgccacccaccccatccctttatcctatggtactttttctttattccaacacactataccaattatttattatgcttattaactatctcttctctctagaatgtcagctccatgagggaagagatttttgttttgttcactgatgtatcctcagtgcctgcaacagtgtctgacatatcaagagcacttaataaatacttgttgaaagaaagaaccaatcaaagcagagttttcaaaaatgggtttgtaaatgattgtctgaagttcagaatagctccccttttcccacagaagcaatgctatggatgctgtattctcagatcaactcatggaaacctactaaactcataatttagccaaaaaattatcttttgttacagagcaccattcagggacagtctgtaagtaagaatttagagtgacaaatttaaaaattaagttgggagatttaatatttgacttaaaagggattaattagtgcaaggattatcttaaattcttgttgaaggccctttcataataatttcttcccaaggccttctgtgatcaccccagaccacaataagcagccttgtccttgatctcacagagtacttgttaactatagtattcatttggcagtggggcacaccctgttttgtaccagttcttttacaaaattacctcttaagctagataatcacagcctgaaactctccgtaaacctcagaaaaaaaattaaaaaatcatctgacgcatttgccaaccctctatagactttagacattgatgggttggcccacttcttagaacactcacagatcaacccatctctgttgtcaagagtcttaatccagcgtcagcatctgcgtcatgtagcagtcaccaatggctaaaccactgtaggattaacacagggctgggccattgcaatgtgtttattatacaatctgccttgagccttttttcatcatgtcaaagagataagcatcagatgaagggaaataatttaaaaaaatacccctctgctctaagccacccagttccccatggcttttgtatttaagagtttggtctgtgctgctgaactggactgtgttttcttcttgggtcttaatatttaactttatgtggaactgtagtttgtgttcctaattggatagtaaactgtgtaagtgtggagactgtgtctctttttacttttatctctcagagtacctagcatggggccttgcacataccagtaattataatgaaagtttacatttatttcatacttttatatagtgctatgccttaactcatttaatctctgcaatcaccccatggggcaggtgcaattattgttctcgtcttggaggaggttactgccacacaaaatggttccataacttgcccaaggtcacacagttaataaatgttttttgcccaagcgatgcgactccagcaccgtgctcttaattaaaaatacataatgtaaaattatggcttaagagattaaaactctctccagtgggtaaaaataccttttaatgttaaaaaaattatatatattaaaaatatatatacacacacatatgcagatgcatacatatacacataatacatacatcatttagttatgagtcatttatttatggggtatacaatatacctggcatagcaatactcaacataaatttagtttcaacagcccatgatgagaacgaagcatctctatttgcactgcatttatcataagcatcctgttaatattatgaaagaaatgcaagtttactgtcatgaactcagagatcctggagtgttgtgaacttcttgcaatatctgcaggcttaagttgatggtaatataagcatttaattgattatttctaatgtaatatttattagcaaatatttattagaaattcataaaatatttttcaaatgtttatgtgtattatgtctatatgtatgtatatgcatatgtacttgtgtgtatgtaattcaaaatattagaataaaaaatcttcacttttgttttctgcatattgtgctttctccgttccttttgatatgttttctttgaatcacagaaatttacaagctgggaaaaagacatttgtcatccagcctattcctcagccaagggaacaatattccccatcatttctctcgtagagctttaggatcccagacttgacatttttagccacagcacttttctattcttccccaaggagaaagtttaagtctgttagatagcagtgagtattgcttactgtgtggaattttgccaaccaaccctcccaggttaccaaagggtatggaaaagaaggcagtgtcctaagaaatattttcatagtcaaggagggagggagagaaaaatctgcctcttatgataaatttcaagactatttgagcttaacatcttgagaaatttgcctagcttcttgccagttcctcgccaaagaggaaaattttatggtagaccacgtcacttatttcagatcatatcctataagtagctataaaatattttaaagtattgcctgacgtattctttcttcttggcatttcctttttatcctgcagcatcttaaccattaaaaaagatcttaggctaaggcttttgttctagaaaagggaaaaaaaaagcaaagaacccagcaagcagaatttcagccagtcaaattcttcactttgaatttcaaaattggctcttaagagggtaagacacaatatcatggaaagagaaagatatatatatttgatatatatttgaagagctaaatgtgcgcacgcacacactgcctctactctcactgtgtgtgagagagagagagagacgtgtgtgtgtgtgtgtgtgtgtgtgtgtgtgtgtgtgtgtgtatttagctctccaaagataagtcctggagcactaatagcatagagtttataacattaaccgtagaagaggaaaaacatgatgatatacaagccatttctctgctacacaaagaggagctaagaaccttttctggtctggagtcgaggaacttggaaaagattcagagagtgaatagttggtgtagggtcttgagaaatgcttctcacggtgaccacacagtgaccaccacatgggtcaatacccttggagcattggtaaagacaaccttctctggacaagacagaggtatgggaatagggagaattagttcctaacttgacaattgaaactcacacaagaaagggcttttctcagagggctccataccatcaaagggcagccaagacagtataaaagtatgtatagggtaacaaagaaagttctgaaatggcttctctcaccctgtatgccccccactcccaatctctggcagccctagaatgaagtggaagggcagccatatgttcctcaggcttgctaagagaggtccagaggttggctaagagcagatggagttcaactgggtcttgcaagctaggcccagaagttgcagagtaaagggcttggtcatcagataccatgaggatgtgccgcatcaacgtacacaataaaagtagaggaagatcccaaagattaggcagggccagctaagcttcagcagaggccagcaaagacagaagatgagatgcacaccagaaaccttttcaccagttatgggatggataacccttggctcctgagaagatggagaaaagaaacagggaacaccctaaatgagtacatatttacctcaaagaaacttgaatttcaagtagtacgttaccaagttgcctgaattgccatggttacattcatctggattttataaattgttataactataaaaaattatattcactacaatagtattttctggaccagacccagtatctaacagatgtagccatataacactaaggcagaagaaactcaagaaacaagtgactttaaaactccctggaatataagtcacattaataattttagaaaatagcaaaaggtattaaaaaaagacttcataaaatatgttatgatcgcaaaaatcaagaaatccatgaaactcgaaatatgagcattttttacaacagttaagagtaacttctaaagcaaaactgagtgctctccaagaaagtctttcattcattgcttatgagttaaatttagaatggtgggtacactccatttattgcagttattgcttttaatacataatttagtaatttatcatacacttgaattcttctccagttgggttacatatgcaagccttttgcctccaaccagaccagaagcttcaagttgcagaaactgaacttgctttatgtaagctgcatggtgccttctccctgaattactccaaagccattcctgcaccaaacaaacctcatcaatttccaaaccaaaaataagttgttctcagtcaacaccaccacgtgttttctagtgcagaaaacagcaaggatgcaaggtctttctcttccctaccatctctttttatgccactcaataatgctgatatcatacttgtttatatctttacggttatacatacatacagacacactcttaacttccttacccctctttttttttctccaaatacaacacatcaattactggtgtagaaatatactaaagaaaaaagtaaagttgcaaatttttcacttggaagattaattaagaggaaaagatcccaacagaacctggatatgccagatgttgttgagaaacagcaagatggaaaacagaaactggaatcatatccacctcatgtactcttaaggtcctggatggttttgagagtgaagaaagcatactgcttcagagaatggccaggaccagcacggagttagggtcctggggtaaggtgggggagttgtctcagataacctggcacacctcagacaccagccaagcagctttggtggtgagagaaaccaactagaagaccctcccccactttatcaaacaagtcatcgttttcatggagctaggagtttgtacctaggacataagagatatgaacaaagataaaattaagttaaattttaaatgaatggggaagcattgtgttcaatcatatgttgtaatcaattagagtccataagtatggggtttcattgttccaatttattttacctgggctaatttaattgaagatactccttggcttctggaatgcccactttagttatttattttgtatttgtataacacttggtagcaataagacatttttaaaagcacttaaaaatgaatattcaagaagaaggacaaaggaaaattaagggctgggaagaaaagaacaaaacagagtaaattacccaagtgcattcaattttattgtgtttgatatacttgctaaaggcaggccacagattggactctgaccttttatccatcagtgcaaagagagaaatcagatgtggtataacatttataatgtttgtaatattaagaaagaaagaaaaaaacagattctcagggaaaacacatttatttacaatacttaacccagagaagaatgtcaagattgaaagtcccaggagaatcctgacactgaatccagcactgtgggcccgtcctgtggcactcgccttaggctggtgagcagaacagagagacacttcataaaagcagttccatggtggtttaggtccaaaactagaatgactcaatccaaggaaacagttcatagaatttagaggagacagtggacatgtatctcaaagtcagcctctgcaaacaccgccttcttcaattgacattattctccctgacaagagcctggagcctgggtattgtctgtggtagacaacatcacatgaggaatggactgtgttgaatttcattctgtttcctgcaccaaatgggtacagaactttcctgagagccatgccttctgttgctttcaaaaatgttttcccacttcaagtcctccccacctcacattcagactaagttaggtcccagtggagttaaacatttttcttctcagagtgactctgcaccttggtttctccatagtgtcagagatggttgttcaggtcagggttcaggtacagggtcatgcaggtggtggaatgaatagtgacccagtgcagtcctcaggaagtcacaggggctgggagggagtgcgggttatgcctcatctcaggctgacagttgccactcaactccaactgcgcgctgccgtgaagaactctgcatttttatgtgaaatttcttactttttaaaatcccatgagaaccaaatgaaaccattctgcttgtgggctccacggtgcaacccctgttccatgcccatgttctttaaaaactatgtttttcagtgaaagcatgaacaaatgtctggaaattatttgaattcccctaaagaacagagatttttattcctgtcactccagagacacttttgaaaataaatagcagtaatatgattcaaggtaggactccaccttgtgtggttaaagaggaaggaattgatggcaactggaagacagcttttacaagtaagggatatttttgttaagcaagatttttattctttttcattttaaacatcaaagatgatgattgtgtgggtttttttaattttttcctttttttttttttttttgagatgaagtttcgctctgctgcccaggctggagtgcagtggtatgatgtcagttaactgcaacctctgcctcccaggctcaagcgattctcctgcctcaacctcccgagtagctgggtttacaggctcccaccaccacgcctggctaattttgtgtgtgtgtgttttcagtagagatagagtttcactatgttggccaggctggtcttgaacacctgacctcaagtgatccacctaccttgacctctcaaagtgctgggattacaggcatgagccactgtgtctggccttattttttacttttgtagagacagagtcttgctttgttgcccaggcttgtctctaactcccaggttcaagtgatccttctgcatcatcctcccaaactgctgagattgcagaaatgagcccatgcttacccgtgattatttttaattggttttactttttcatacatagggttctgtgctacctctgttttctttttcttgcttgctttttttttttttttttttttgcgacagagtctcgctgttgcccaggctggagtgtggtggtgcgatcttggctcgctgcaacctccacctcccaagttcaagcaatctttgtgtctcagcctcctgagtaaatgggattacatgcgcccaccaccatgcccagctaattttttgtatttttttgtagagacagggtttcaccacgttggccaggctgatcttaaacacctgacctcaggtgatccgcctgccttggcctcccaaagtgctgggattacaggcgtgagccaccatgcccggcctgttttcttaaatatgtagtttagattccccaaacatgttcttctccctacaatatgaaggctttaccagaccatctcagacacattcatgctgcttgcagcccttagcagtgggatccacagatctttattgagcaactaacacgctcctgacaggaacggcagactgagtgactaactctgcctctttggatgattttttcctccccatcttaatcaatatctacataattgatcaggtgagccagatggcccttccgcttcacagattaagacaattaggacaccagacaggtgttcaagctggcatttttcataactaagacaagaaaacctaacactttatcttccttggaaaaaggcaagctccatctggtcctgggcatgaatcagtactaattcatacgctatctagctaaaaatgggtacaaccatatttagacaaaatacggtataaaagggaattatgtgtcagtaagtttgtaagagctcccaccacagaatctggattgaaatatcatagtaaaaacctaatagaatactgagaacactgtgtgtaccaacattttacagacactcttaagagaaagaggctggttctagaaagcaactagactcccttctctaggaccaaatctcagagagacgaagagctctgagaccgggggagcctcacagctctgagctctgaaatgactggggggaacaaaaagacctagaaacacaaggcgagttataaggaaagattaaagatctatttctggaacctagacttacagagggtactcttcccatgccacatgctatttcaatgggagaaaaaatgcaaaacaagtcgcagtttgaacatggaatggttactttatttagaacgagaagaatgtttaccattctgtagctaaacataggacttgcatttcaagaggccaggggatttatgcttccctctatgacatgttctcttaactccaagccccagtgttccattgcaagagtagcagagggactcagctgtagtggagggaccccactgtagcagggatcatcctagaaatgacactgaacaccaagcaggcccctgcagaagatttataaacataagagccactccaaagtacctgggcaccctacccgccacacgaaggagaactgaaaaataacagaagtgcctctgggaaggaaatgacaaatattcctcctgtctcttgccttccatcactcataccaattaaaaagtaaaacgaacatcgccagtgacaacaatcaattttcccagtttataatcaaacaagatttcagcaaccaagaatgttgcaaaaaaaattattaccataggccctgcatatttctatagtaaataaattcattaatcatcaagagcgcttatatgatattctcttgatgatgaattaattcacttatgagaagagaattctggaaaaagtcatgttaagaatcctgcaggtggagaatagctaatggatgctgggctcaatacctagataatgtgttgatctgtgcagcaaaccaccatggcacacaaagattatctatgtaacaaacctgcatatctggcacatgtacccctgaagttaaaataaaagttagaaattttaaaaaattaaaaattaaaaaaaagaatccctggctgggcgcggtggctcacgcctgtaatcccagcactttgggaggccgaggcgggcggatcacgaggtcaggagatcgagaccatcctggctaacacggtgaaaccccgtctctactaaaaatacaaaaaattagccgggcgtggtggcgggcgcctgtagtcccagctactcgggaggctgaggcaggagaatggcgtgaacccgggaggcggagcttgcagtgagccgagatcgcgccactgcactccagcctgggcgacagagcgagactccgtctcaaaaaaaaaaaaaaaaagaatccctcaggcataattcagtctggccttctggcctcgattttaccattcaagagtaactggaaaatatcatgcatgacaaaccacccccaaaattacacacaattaacaaagtaaaatgtcattttaaaattaaaatagaaaatatgttgatgtttttaggatgatgtttgctgaacgggataggtgggaccatgtgggatggaggagggggctggcaggaaagagtggccacaggcagggtgctaatttatgagtcagtatgcatgaggatctaaagaaatctaatccaggtttttatgatttttaactcagaaaaacgcagttacctgctgacaagaagcagcaatgctgaaataagagaaaagggaattgggacctgaatttgtttcctattgctggtttaacaaatcactacaaattctgtagcttaaaacaacataaacttattatttcacagttctggaggtaagaagtccaaaacggtcacactggactaaaatcaagttgtcggcagctctgttcctgttggaggctctagaggagaatccgttcccttggctcctctctcttctagagtctgtctgccttccttggctcttccagtcagcagttacatcgctcctacttctgcttccatcatcacaaccccttctttcactcagaccccccctgcctcccattttcactaataaggaccctcatgataacactgggcccactcgggtaacccagtatcatctccccatcgcaagaactttaactcacatttggaaagttcctttctctatataaggtaacacattgacaggtttctggggattcggatttggacatgtttggagaccattattctgcctaacacaatgccataaattattgagctttattgctaacagagaagtgtcagaagaaaatgaatgatcaattgtcatgttttataattattcgtccccctctcatacacactcaaacctttttattcctgtgccctatatctattttatattagaaatggctagaatttgctgggtgtttgtaagtatcaggtactgtgctaggcaacttacttgcattttcatatttaattgtctcaacaatccagtgaggtaagtgccatcctcatccccatgttgtgaatgggaaaactgaggcttacagaaggtaagtcatttgtctgagcttttacagctgaaattcaaacctacgtctgtttgaattgagctagggctcctaaccaataagaaaaaaaaaacagaatatattgaggcttacaacaaacaaaggtgtattcttccttatgctccatattggacaccacgtattcatctggggcctgctgcagcctgcacatcatcatcattctgagaccctggctgaagaggcagcccctgcctgggagattgcccttctcagatgttgctcttcgtcagcagtggggaaagacagggatgggggggatcttcttggcggcttttagggtgttaatttggaagtgatgtgccccacttctgttcacatctcattggccaaaacaaactcaatgaccaagcctgatatccatgtagctgggacgaatcattctgtcaccatgcagggcagcaaatatttggaaatgataccacactctgctatggctcttagcttctgtgctcactgagatgagaggaaaaacaataaactattattatcacagagagtcaagatgactttggactttccttagtggcacagcactcacctccaggccagatggactcctggatctatgtagaagaggccacctgtataaagggagattctgagaacctgaaattttccttcatccagatgcccaaagtatctgacactccaccagtagagataaagttgtgctgcctgaggatagctatgtgctactaggagttatgacgtgttcttcaaggaggctttctcccagctggtaggactcttggtatggagctccctcaaagcagcagatgagaaagagtaagggtctcctagtctgaaggctttgtagaattctaatccagatgaagaacactcttctctgaggacagttcttaggactcaaagattgggaatgatgattacatcttgtccagtatttctgaaacaaggagcccttggtgtgctataaaggtgtctcagaaatagcaagagagatacacataacccctacatgcccttatgccctgggggcttgacatacacagaagctaaggctaggataagaaatggggctttcagtccatcagcaaacaaatggataaagaaaatgtggtatatgtacacaatgaaatattattcagccttgaaaaaagagaccctgccatttgccacaacatggatggacttggaggacattatgcttgctaagtgaaattagccagacatagaaaaagaaatattgcatggttttacatattgtggaatctactttttaaaacctcaaatacacagagaaaatgaaacagtagttatcacaggtgggagtggggagaggaaatggggtgatgtaggtcaaaggatacaatatggcagacatgtacgatggacaagtctagagatctgatgtacaacatgaggactgaaattaataaaattgtattgtattagcaatttttgtgaaacaagtagattttagctgctcttatcaccaaaaaagtaacatgtgagaggacagatattaatctgcttcactattgtaaccattttactatctacacgtatctcatatcatcatgttgtaaacctcaaatatacacaataatatttatttttttaaaacaagaaatggtgctttcaggactgagacttaaagtagattaacagagagaagtgttctttttgatataaaaatacaagactgtctgctaagagtggctccatcttagggggctagaagttctgtctgtcaggtatacctgtggttctgaatggctctgcatggcccatccatagaggatggagctgaatgaccatctggcagtgtattagtctgtcctcccgctgctaataaagacacaccccagactgggtagtttataaagaaaaagcagtttaagggactcacagttccatgtggctggggaagcctcacaatcatggcagaaggtaaaggaggaacaaaggctcatcttacatggtggcaggcaagagaccatgtgcaggggaactgccctttataaaaacatcagatctcgtgagacttattcactatcataagaacagcatggggaaaaacccacccccatgattcaattacctcccactcggtccctcccatggcacatggggattatgggagctacaattcaagatgagttttgggtgaggacacagccaaaccatatcaagcaggaagcaaagaagaagagggtgatcataaagggcagggggatggcagggacggggaggcagggtggtgaaggaagctcaagggctggttccaggggaggaacaaggaagagagagggtcaaaaggggaggtttgttctctgtgactccgagaagggctatgtgggtgagctccataactcctggggtgcagaaggttgcatggaggaaagtcacgcctctgatgcccctacctccttttgaattccttgggatggacatgtgagctgaaatggccaccagcaaggctgcttaaaaacacttattatatttttacttttttctgtcacaaaagcattgagtgcacaaacataaaaggcttccacttaagattttgtttgaatgtttaaaaacaaagagtgaaatgccacaatttaatccagtgttcttatctcatgaaaaaggaaatgggagcacagattaaaagactagtctaaggtcaggagaaaaacaggtagaaagttgaagccacaaccaagacttggggctcccagtccagtgctccctcccctacagccatatatccctcagctcctgggttcccattgttggtgcccacagcctcctaagtgaggggaggcaaccctttgctttccctgggtaacttgttgaggcagggtaagttatttacttggattctgcagcagcaccacccggctttgaaagcaaccaaaccctcatcttcctgagttactaggctcatctgtacccataagagccacagcataggagaatgtgacctggcttcacccgggttcccactgtcttgtcacatctgttctcttggcctcctcttatggaccctggaaagacctctcctgcttgccaggttggggcatcctgttagctggctaccagttggatttttcacaagtttgccacgttgcagtgacaggactgtgttgaggcccagatgcctcagcataaataaataacacatctgggatgtggaaggggtccaactgcatattatagaagaagctggggtggaaacagagccaaaggatacacatctggaaacagttaagtcaggagtaagtggggaggaggatgtagtagaaaaagagagaagaaaggttgaggggaaagatcaaactaggaattactgttgtctggaaggatctgaattaaaattgctaagaaacagaaccatggtttatataacagctgaattaagagcattcctataaaaatgatagtttataataattgacctcaatgcagagaggctgagcaggaccgagcagctggaatcctggacgtctgattgctttggatgtagctaggaggggtggttccctcctagctatttgaatctataaatggcttcgcagtgagcagggtgaaggagttcaaccctgcgcagatgagaaccccagggctccctgcccaggatcaccaggcacttgggaggcttagtgagttcccaggttcctgggcagcctccgcttaacatgcctgttgtgaatatacagagcattaaagaggaggcctgggaagagggggacgtgcagtgacaccgcttcctcccagccagagacccaagcagatgattcacctagatgaatcaggaatggctgcagagggaactgctcacacccatgcccccagccagcaaccgaaagctacagtgacatcactacacagaggacagaagtctaagtaacggggaacttaggacaaaaagaagagagaaaaaaatatccttttctctccctctcaatggaattcaagtgtatggattaccttcttaatggatggcctgatttaatctcctggcataaaaatattccaaattaatccatcattaagagaagacagaatgcaggcattccaagcaaaacacagaagcacagggcaaggcttttctcatttcttccagccccctttcactgagtctctgttttatgacaggtaatacaggctggatcctaagagaggctccagctgacttggggctgaactttgatggtggtaaaatgtaggcttgtcattgtttaaataaaagcagatgactcagcaaaatggacctaccaccatggcaacttttacacctggtttggttgagattccaggttttctacatgtgcagggaatctgaaagaataaatggctttcttcgggtcttggttagaaacagtttccaattggcgataattgtactttagagaaccctcaaaatgatcaaaccataatgctactctcaaatactaatccttagtttgtaggttctcagtattctagtggaggggagaaaccagtccatcttccaatatcatatgccttgtgattctgaaatcttttaataaaacataattagggaatatgattagaacttggtatgattcagttttagatctgtgcgtaatattaaaagctttgttcattcaagaaatatttactgagtcttctaagagcctggcattatgctgggagctgatgggtacattgctgaatgagacagagcccctgctctcaaggagcttataatctggccaccagagtttctgcaaccatcgtaacagtaaaaacacagctgttaattctgttcaagttaattttccagagcaccagtgaatttgagggcaaaagaaggctgcatagctctacaagtattccatcctcaaaataaaaatagaactatatttagaaaatcttaattttgtggcatttcaagagcacagaaactacataaagagagataagccaaaattctttctgtagcctggttattaatttgcggcttaaaatctgctgcaggagactccaaaccaaagtgatattttgtggaagaactggggaggttgaaaataatggttgaatataacgtctcctaaaagtatctccttattcaaaatccacacaattcaggagcaattctgaccaatgtgagatagtttaggtgctgtttaccagctaaaatggcactgccatgtggccatagcataaacaccatttataatatatcctgcctgtctgtttgaaattatatgatttggggctcattgtttggttagtttcggggtaagctggattttttctgtttgttcctccagatccttctctactctgctctgtattcccaggaagtccatctatatggactgcatcaacaggttctctagccttctggcttccaggaatgtttcaccgatggctggcacttgcaagaaatcagggagatggggtcggaggaggagccaagatggccgaataggaacaggtcgggtctacagctcccagcgtgagcgacgcagaagacgggtgatttctgcatttccatctgaggtaccgggttcatctcaccagggagtgccagacagtgggcgcaggccggtgggtgcgcgcaccgtgcgcgagccgaagcagggtgaggcattgcctcacctgggaagtgcaaggggtcagggagttccctttccgagtcaaagaaaggggtgacggacgcacctggaaaatcgggtcactcccacccgaatactgaccttttcagaccggcttaaaaaacggcgcaccacgagactatatcccacacctggctcagagggtcctacgcccacggaatctcgctgattgctagcacagcagtctgagatcaaactgcaaggcggcagcgaggctgggggaggggcgcccgccattgcccaggcttgcttaggtaaacaaagcagcctggaagctcgaactgggtggagcccaccacagctcaaggaggcctgcctgcctctgtaggctccacctctgggggcagggcacagacaaacaaaaagacagcagtaacctctgcagacttaaatgtccctgtctgacagctttgaagagagcagtggttctcccagcacgcagctggagatctgagaacgggcagactgcctcctcaagtgggtccctgacccctgacccccgagcagcctaactgggaggcaccccccagcaggggcacactgacacctcacacggcagggtattccaacagacctgcagctgagggtcctgtctgttagaaggaaaactaacaaccagaaaggacatctacaccaaaaacccatctgtacgtcaccatcatcaaagaccaaaagtagataaaaccacaaagatggggaaaaaacagaacagaaaaactggaaactctaaaacgcagagcgcctctcctcctccaaaggaacgcagttcctcaccagcaacggaacaaagctggatggagaatgactttgacgagctgagagaagaaggtttcagacgatcaaattactctgagctacgggaggacattcaaaccaaaggcaaagaagttgaaaactttgaaaaaaatttagaagaatgtataactagaataaccaatacagagaagtgcttaaaggagctgatggagctgaaaaccaaggctcgagaactacgtgaagaatgcagaagccgcaggagccgatgcgatcaactggaagaaagggtatcagcaatggaagatgaaatgaatgaaatgaagcgagaagggaaggttagagaaaaaagaataaaaagaaatgagcaaagcctccaagaaatatgggactatgtgaaaagaccaaatctacgtctgattggtgtacctgaaagtgatgcggagaatggaaccaagttggaaaacactctgcaggatattatccaggagaacttccccaacctagcaaggcaggccaacgttcagattcaggaaatacagagaacgccacaaagatactcctcaagaagagcaactccaagacacataattgtcagattcaccaaagttgaaatgaaggaaaaaatgttaagggcagccagagagaaaggtcgggttaccctcaaagggaagcccatcagactaacagcagatctctcggcagaaaccctacaagccagaagagagtgggggccaatattcaacattcttaaagaaaagaattttcaacccagaatttcatatccagccaaactaagcttcataagtgaaggagaaataaaatactttacagacaagcaaatgctgagagattttgtcaccaccaggcctgccctaaaagagctcctgaaggaagcgctaaacatggaaaggaacaaccggtaccagccgctgcaaaatcatgccaaaatgtaaagaccatcgagactaggaagaaactgcatcaactaacgagcaaaataaccagctaacatcataatgacaggatcaaattcacacataacaatattaactttaaatgtaaatggactaaattctccaattaaaagacacagactggcaagttggataaagagtcaagacccatcagtgtgctgtattcaggaaacccatctcacgtgcagagacatacataggctcaaaataaaaggatggaggaagatctaccaagcaaatggaaaacaaaaaaaggcaggggttgcaatcctagtctctgataaaacagactttaaaccaacaaagatcaaaagagaaaaagaaggccattacataatggtaaagggatcaattcaacaagaagagctaactatcctaaatatatatgcacccaatacaggagcacccagattcataaagcaagtcctgagtgacctacaaagagacttagactcccacacattaataatgggagactttaacaccccactgtcaacattagacagatcaacgagacagaaagtcaacaaggatacccaggaattgaactcagctctgcaccaagcggacctaatagacatctacagaactctccaccccaaatcaacagaatatacatttttttcagcaccacaccacacctattccaaaattgaccacatagttggaagtaaagctctcctcagcaaatgtaaaagaacagaaattataacaaactatctctcagaccacagtgcaatcaaactagaactcaggattaagaatctcactcaaagccgctcaactacatggaaactgaacaacctgctcctgaatgactactgggtacataacgaaatgaaggcagaaataaagatgttctttgaaaccaacgagaacaaagacacaacataccagaatctctgggacacatccaaagcagtgtgtagagggaaatttatagcactaaatgcccacaagagaaagcaggaaagatccaaaattgacaccctaacatcacaattaaaagaactagaaaagcaagagcaaacacattcaaaagctagcagaaggcaagaaataactaaaatcagagcagaactgaaggaaatacagacacaaaaaacccttcaaaaaatcaatgaatccaggagctggttttttgaaaggatcagcaaaattgatagaccgctagcaagactaataaagaaaaaaagagagaagaatcaaatagacacaataaaaaatgataaaggggatatcaccaccgatcccacagaaatacaaactaccatcagagaatactacaaacaccactacgcaaataaactagaaaatctagaagaaatggataaattcctcgacacatacaccctcccaagactaaaccaggaagaagttgaatctctgaatagaccaataacaggagctgaaattgtggcaataatcaatagtttaccaaccaaaaagagtccaggaccagatggattcacagccgaattctaccagaggtacaaggaggaactggtaccattccttctgaaactattccaatcaatagaaaaagagggaatcctctctaactctttttatgaggccagcatcattctgataccaaagccgggcagagacacaaccaaaaaagagaattttagaccaatatccttgatgaacattgatgcaaaaatcctcaataaaatactggcaaaccgaatccagcagcatatcaaaaagcttatccaccatgatcaagtgggcttcatccctgggatgcaaggctggttcaatatatgcaaatcaataaatgtaatccagcatataaacagagccaaagacaaaaaccacatgattatctcaatagatgcagaaaaagcctttgacaaaattcaacaacccttcatgctaaaaactctcaataaattaggtattgatgggacgtatttcaaaataataagagctatctatgacaaacccacagccaatatcatactgaatgggcaaaaactggaagcattccctttgaaaactggcacaagacagggatgccctctctcaccactcctattcaacatagtgttggaagttctggccagggcaatcaggcaggagaaggaaataaagggtattcaattaggaaaagaggaagtcaaattgtccctgtttgcagatgacatgattgtttatctagaaaaccccatcgtctcagcccaaaatctccttaagctgataagcaaattcagcaaagtctcaggatacaaaatcaatgtacaaaaatcacaagcattcttatacaccaacaacagacaaacagagagccaaatcatgagtgaactcccattcacaattgcttcaaagagaataaaatacctaggaatccaacttacaagggatgtgaaggacctcttcaaggagaactacaaaccactgctcaaggaaataaaagaggatacaaacaaatggaagaacattccatgctcatgggtaggaagaatcaatatcgtgaaaatggccatactgcccaaggtaatttatagattcaatgccatccccatcaagctaccaatgactttcttcacagaattggaaaaaactactttaaagttcatatggaaccaaaaaagagcccgcatcgccaagtcaatcctgagccaaaagaacaaagctggaggcatcacactacctgacttcaaactatactacaaggctacagtaaccaaaacagcatggtactggtaccaaaacagagatatagatcaatggaacagaacagagccctcagaaataacgccgcatatctacaactatctgatctttgacaaacctgagaaaaacaagcaatggggaaaggattccctatttaataaatggtgctgggaaaactggctagccatatgtagaaagatgaaactggatcccttccttacaccttatacaaaaattaattcaagatggattaaagatttaaacgttagacctaaaaccataaaaaccctagaagaaaacctaggcattaccattcaggacataggcgtgggcaaggacttcatgtccaaaacaccaaaagcaatggcaacaaaagccaaaattgacaaatgagatctaattaaactaaagagcttctgcacagcaaaagaaactaccatcagagtgaacaggcaacctacaacatgggagaaaattttcgcaacctactcatctgacaaagggctaatatccagaatctaaaatgaactcaaacaaatttacaagaaaaaaacaaacaaccccatcaaaaagtgggcgaaggacatgaacagatgcttctcaaaagaagacatttatgcagccaaaaaacacatgaaaaaatgctcatcatcactggccatcagagaaatgcaaatcaaaaccactatgagatatcatctcacaccagttagaatggcaatcattaaaaagtcaggaaacaacaggtgctggagaggatgtggagaaacaggaacacttttacactgttggtgggactgtaaactagttcaaccattgtggaagtcagtgtggcgattcctcagggatctagaactagaaataccatttgacccagccatcccattactgagtatatacccaaaggactataaatcatgctgctataaagacacatgcacacgtacgtttattgcggcattattcacaatagcaaagacttggaaccaacccaaatgtccaacaatgatagactggattaagaaaatgtggcacatatacaccatggaatactatgcagccataaaaaatgatgagttcatgtcctttgtagggacatggatgaaattggaaaccatcattgtcagtaaactatcgcaagaacaaaaaaccaaacaccgcatattctcactcataggtgggaattgaacaatgagatcacatggacacaggaaggggaatatcacactctggggactgtggtggggtggggggaggggggagggatagcattgggagatatacctaatgctagatgacgagttagtgggtgcagcgcaccagcatggcacatgtatacatatgtaactaacctgcacaatgtgcacatgtaccctaaaacttaaagtataataaaaataataataataataaaataaaataaaaaaaagaaaagaaatcagggagatggaggagagaggtcaggctgtctatgcccagggctccctctctgccaagtcactgtgggtcagttgcgtcttgtccagaagtccccagcttctgtcaggtggccctcttcacaaccactctcccaggggctcattaatgactcattgccttgtcctttcagaactgaagggggtacaagtactattccgtgtagtttccctacatcctcctcacacctttataaacagtcattttgtccaattaaagtgtgccatatatttcctgctggaaccatgacagatacaggggatttcacattatttcaagtgttgtacctaaaggaaggctttattattattttcatattacagggtttcaaatttccatagtaaaatttgcatgaaaaagcattaatttcaacagatccccatgcccatctgtatcagtaacggtagaaaattgtttacaataacctgccttagattttcctttctggcttaaactattctcatttatgactttgggctttccttttccactttacttaatttagcttaaatagtagatgtaaggttgtccaataactattccctccaccctggcttcattcattccttggcaaaaggacaaacagagtttacagtggacacattaaggcaatcatccctctgcctttctagtcattggaaatccattctcaggcaacgtaagctctgaaatatttagaacaagcatgtgacatctctccttccactgcagcacagggtttaatttttgttttgcttgatttcatcattgcagcccttcttgctgggtcactgattcagcagtatatggtttggcttccactacagctcagcaaagccaaggcacacagtttggccatggggcaaatgggtgtctgttaccaaaagctgtggtacatctgctaatttatgggcataacccatcatttcagcatttcccacctccatctggaactccccatccatccattcattctttttcactgatgccatttccacttcatcatttgcaaggaaatgcattctggaagcatagtgggaacgggcaggcaataacttcctgagatgcatgtccaaggaacatacatttaaatgaaaaggcaaggatggacagtgacccaccttcggatgggcagatgatcagcatactggctgacagcattgactttagaatcaaatctggatcttctgctttgtattagctatgtaacatgggccagttgcttaaccttcttctctattaatacctacctcaatggccattgtggaaagtaaatgaagtaatagcataaagctcttagcacagtgggtgacacagtgggccttcaataaatggtagctagtctcaaacagtgagccccttggtggcttcccaccctctttttctttttagacggagtctcactctgtcacccaggctggagtgcagtcacactatctcggctcactgcaagctccgcctcccgggttcccgccattctcctgcctcagcctcccgagtagctgggactactggtgcccaccaccacgcccggctaattttttttttgtattttttaagtagagatggggtttcatcgtgttagccaggatggtctcgatctcctgacctcgtgatccccccgcctcggcctcccaaagtgctgggattacaggcatgagccaccgcgccaggccagcttccctccctcttaattctttcagattaagcacaccctctaccttccattgcatggttacgacacataggaacagagagaattttccttttattgctatgtttagatttgctaatcacttttagtcacattttcctgtcccatacagacctcagctctacaaacccacgattatgaaaaagggcagcgtcataggcacataaggttttccccttttaacctcttttaagtcattgtttttggggtgaagggttaggctgagctgtacttctctgatgcctctctccgaataataaaaggccagaaaaacaccatttagcccataaaacgacctagcagctaacccttccgattttcctatctgcttacaactcctctattggaattgtttttattttctactccttcctttcctaaatctatgaaattcaaatttaattcctccggtgaatagatatcactgaagaattttaagcaaagagatttagacttagatcctcaaaagatccttctgggggtgtataaagaatagggagggagggctcatctatctcagtgctgatggaacattaacatgcatctaatcactgtaaaaatgcaagtcctcatttgcagtaggcttggggtagagcctggaattctgcacttctaatcaatactgctggtccatggggtgtacttgcgttccaaggagccaaaccacctaataatacaagctctgatagtccaagttctgatttaggaccattgcccatatcttgccccatataactcctagtatagtgttcattatagttaacatgtttaataattgctttctgacaatgctgatgtcgattgctgacagtcaaaaaatgaagagaaattaaattattgaaaatgtgcccggaagatttctaaatgcttggtttttgtttgagggtagagaaaaataaccctgagtttacctaccttagtttaggttttgccaaacaattcaacaatttcagatgaatttttcagttcaataaaataatgggtcaattcagaaaaaaaaaaaaaaatctgtcactatggttctctggtagcactgacaggttaacttaatgccccttgtagagaaggactgagtgtccgaatgcctaaagtccttttctcagtcaactcttcttcctttccctggtctgatgtggagacaaagtcactggggctgcattgcccgttctgtcactcacacttctctaagccactcaaatcacaaacggtttgcttgttccggcaaagagtgaacgatctacctcagggaccctcattttcccagatcagaggttctcaaagtgaggtcctgcaccagcaacattagcattacctggggacttgggagaaatgcaaattctcagcctggacttcagccctattggatcagtgattccgggataggcccagcactctgtgttttaacaagccctccagctgatcaagttagagaactattgccctcaacttgggtttcctggtggaggaacttcagctaagcaacccacctgataatttttccccaccataaagagaagatctatgtataattgctgagtgcgcaagaagagattagacattctaagcttggcacctcctgggatctctgattctgatcttcctttccccggggaggatccactctgcctgcttccagccatactggaggtggtctgccccactaggggaggcctgtgtctgtccaactgtgcctgagacagggtgcagaagtttaattctaagaaaagtgtcaggagacccactgtggataatgttcacttctccagggaacattatccatgataaagctgatatgtgatctccatctctttgcttcctgtgtgttatttctcaaaggatcccaaatttggaaggtgaaaaaggatgctctttattgaacctctaaaactccaacatattgttgtctgaataaaaaaacccacgagaaataataacagttaacacgatttactatgtgcctattttctaagccttctccatgtagtaattcacttgtgtccccacaattctctgagaaacaccctgttattatcatgacattttacagatgaggaaactttggcagggaaagatttaaaaacttgtctgaggttttgtagtctagacctgtgagaactgtgacttaaccccagacagtctggtcccagggtcctccctgctatattgatgaggattgctactttggttgaaaagaattgcttcttggggagaaaatatctcacgtaagtgactgaagccaagaagtcttgattcaaggctggaagctttgggctttttgacttagtccattcaggctgctataataagataccataaactgggtggcttataaacaacagaaatttatttctcacagttctagagatgggaagtcctagatcaaggtgctggcagattcagtgtctggtgagagctcagtgtattgttcacagatagccatcttcttgctgtgtcttcacatcatgaaggatgagggagctctctagggcctattttacaagggcactgatcccattcatggtggctccaccttctaaaactgtcaccttgggattaggatttcaaccaatgaatttggaggggacacaaacattcagatcatagcagctttgtaagtgttcaagtaaaaagagaacatgcaagttttttaacttggaagttaacagcagcctttgctgtagctaggggactgcctcatgtagtattcgctttctattgcggcataaaaaattaacacaaacttagtggcttaaaacaccaaacatttattatctcaccattcccgtggttcagaagtcctggcatagctatacttggtcctttgttcaaggcctcacagagccacaatcaaagcattggccagggctgtggtctcatcagaggcttagagtcctcttccatgctcacatggttgctggcaatattcagttcctcgtgggcatatgactgaggcccatgctcctagaggctgcccctttctataggccattcatagcagggctgtttgcttttcctagactagcaggagactcttgcttttaaggctttcacttgattaagtcaagcccacccaggatcatctcctttttgtttagttcgaagtcaactgattgagaacccagtcacagatgtgacatgacatcatattcacaggtacctcccacacttcaggggtgaggattatacagctcatgtatactagggggcaggaatttggggggcagaaccttagaattctacctaccacaataaacaatgactgtgatgtcctttgaggttgtctttggtgtgaccttgcaggagcactttatgcctgagcaggcatggctgcagcaagaatttgattttagggaaaatagaaacttttggacttactcaagaaatcctaaaatcaacagagctatagtacacaagctgtttggacactagggtatgaaacaattgcttttctgcttatgttacgtttcttagacatttctagaggcgaggcctttaaactacaaaggcagctatattattcctggatgcagagcaccaacgttcattttatgccagtcatgcatagacagtgctaagtcagctacacaacatgcagttctccgtatgttgtttagaactgtattcaggcacaagggggggaaatgtggaaataggtggcaaatccacagactcaactcacccacaagcttcagtctccagttcgttctgaacttgctaactacatacattctggccctcactttacattccagggtccttaactttggtgacactccaaaagggtaatagatttcaccaacaaatgtaccaataggaataggagccatcaatttatagagaatattccaactctttgggtttaaataaagaaaaacagaccaaaaaaaaaataccctcaaaaagctcagtgaaattattacaaactcaaagctaagagagcaatttaggcagtctgagcctgaaagagtgtttctgaaagcagatttgttcagaaattcagggaggaactggaatgattgtccaaatatgcttctgtctcactatctaaacaagggcagaaagaaaattaaagacaaataaaagcagatgggctgagtaagcctagggaagagaaaaatttccttaaaagaaagattggactttaaaagacaagataaatgggtatagaggagataaagaggcacacccagctctaactgctcataaagagaagattaagaagaagatccaccaatctaacacagccagctgcaacaacccctcctctgccctcaccctcaagggaatccctagttcgggaccccactgggaggcatgctcttgcagctataggaagagagttcatcatgagagcaactgcagaaatcacacacgggagactgcactgctctgccaggtgatcacagaaattttagacagattgaagagggaaagatccaactaaaatattcaaaagaattactgggtgagtttcaaggtagaaccattattgtaagtaaaggtgaagtattacctctgatctaaaagaagatgccgagaaatccatggaatttggacaaagaaagccccagtgaagatgagaccttctgaaaggaagcaaagcaggaagaaaatagttgcaggcctcaggttacatattggtctgatgggactatacctcctaggctggagtatcccatatatggaagtgaaggtggaaaacttgtgtttgaacaatgaatgctgggaagatccagaaatctttgactccttagctctcagcatgaagaaccccagagacaaaatctagaggggtataaaaaagacaaacacaatcctaaaatttcaaagttatggtcagggaatggtggctcaagcctataatcccagcactttgggagggcaaggcaggaggatcacttgagcctaggagtttgagaccagcatgggcaacatagagagaccctgtctctatgaggcaaaaaaaaaattagctgggtgtggtggtgcatgcctgtagtcccagctaactgggaggctgaggtgacaggatcgcttgagcctgggaggtcaaggctataatgagctgtgattgcaccactgcactccagcctgggctacagagcaaaaccctgcctaaaaaaataaaataacataacattttaaagctttagtttgctttacaggagagaaataagaccctgaattaggcttggtgactagggctgccactgctgtgaatttctttctttctttttttttttcctttgagatggagtttcgctcttattgaccaggctggagtgcagtggcgtgatcttggctcaccgaaacatcttcctcctgggttcaagcaattctcctgcctcagcctctcgggtagctgggattacagacatgtgccaccatgcccagctaatttttgtatttttaatagagacagggtttttccatgttggtcaggctggtctctaactcccaacctcaggtgatctgcccacctcggtctcccaaagtgctgggattacaggcgtgagccaccacacccggctgtgaatttctaaatttggcaagaaagcaggaacacatcaacattcagtccctaacgaagaaaatggttttcaggtgtggcttctacactcgcctccaatatggttaaccagtgcgatgtcacctctttatggaagatgtctcccagctgagtttaaattaaaaggttataggctatggacaagtatcttagatagaatggttggcattttgataaagatgaaactgaaaattcctctttctcattgcctctgctacagtctccatggcattaaatctagacttatggggatatagtttggccagatatacctgctctagaacatgggtccccaacccccacggtactggtccatggcccgtgagtaacctggttgcacagcagaaagtgagtggcatgaaggttgggcgagcattactgactgaactccgcctcctgtcagatcagtggtggcattagattgtcacagaagtgtaaactctattgtgaactgtgcatgtgagggatctaagttgcacactccttatgataatctaatgcctgacctaaggtgaacagtttcacctcaaaaccatcccccaccaccactatccatggaaaaattgtcttccatgaaaccagtccctggtgccaaaaaaggttggggactgctgctctagaagatgataatttgcttatggtcctctaggaggtggtaatttgttccagaagaaaataattgataattttgggtatcctattaattattgggacttattaaactaagagactttgtgttgaattaattcacttcaaaggcaccaaaggaaacacacatcttccactcaaaggaactgtacactcaggccctgagaatcctcctggtccagcctgagccaaacatgcctgagaatggttccggccatcagaccaaagatgtcccagtaaacttacaaatcacatccttgatgcctttctcaccccagctgtcctccagcatctccttctcctgctcctgactcccatctccccaactgccatgccccactccctccctcttgttccctctctgacaatgagccttctagagccatgctgtccactgtgatagccacacatggctattaagctcttgaaatgcagctcttcaaaattcaaatgtgctgtaagattaaaatacatgctggattttgaggacttggtatgaaaagaaataaaatatctcagtagtttttgtagtaattagatgttcaaatgataatttggggggttaaacataacatactaaaattaattttatttatttcttttgccatttttttctcttttattaagttggtgcaaaaataattgcagtttttgccattgaaagtaatgccaaaggcagtaataacttttgcaccaacataataccttttctaaattaaaagatttaaaattacctatgtggttcacatttccttccttccttccttcctttcctttttttttttttttttttattttttggacacagttttactctgttgcccaagctggagtgcagtggcactatctcagctcactgcaacctccgcttcctgggttcaagcgatgctcatgcctcactctcctaagtagctgggattacaggcgtgtgccaccatgctgagctaatttttatatttttattagagacagggtttcgccatgttggccaggctggtctcgaactcctgacctcaagtgatccactcacctcagcctccaagtgctgggattacaagcgtgagcctccacgcccagacggttcacattatatttctattataagtctggtgccccaggccccagccatctcactccatcctcccctactcctggtctgctgaggcacccaaaccaacctaactttccttcttctgtatgagcataagattttggtgttcttagttggagaattatttaataaatgaaccatcacaccatgatcataatggttgactatgcttacttttgtctctccacttgtacttttgaacacctaccatgtttatggattgtacttgctgtcaacgaggcataccaaggaagataggacagcccctgccatccagaagctaataagctggcagggtgtcctcatttaattagagtaatccgaaacactgacatatcctcccataaaggaatgaatcaaacaggaattctaggcaccatggaggaattaggaaaactatttgtattatgggttataaagaaagtttcatggagcccttcaattcataccacgtgtgtctacatgcttccagcccactgcattgtcaagcagttgcaggcttttggtttttcgagggtttttgtccctgacaagaattacgaggtatctctttctctggtgcagacagagaagaaaagtaaatgacttgagccaagttagagaaataaaacaaaatgtcaaaatatcttctattctgtctcatccatttgaagagccaggtgtctgggagctgtgccttgatgggttcaccctacaacattttcttcccatttctgctcaaagcaaaaccaattaaacaagagccccactcagagaggaaataagttctgagagaatggttattttgtctcttttctcttttcattgaggaaggtaatggcgccagttcaagaagccaaggataattttgttcataaattgtatactttgacctcatggtttttagcacaaattaaagatgggatccagtttcagttctctttcttttgaattggattattttaaaagagggatgttttccctgaagtatttagtatttgcaacccaaacattttctgctcatggctgtctacagggctgccttttagatataaatgttcctaatagatcacagtttgaggcttaaaatgtccatgtttatcccaacatgtttatttcctttctccttctgcagacactgtagtcaatttcttttccaaccctttttatctcaaagaaaacaagctttatcatttggaagtgtatctcatgccataaaaccaggtcaatattaagagaagagtgtaatcacatagatcagtatcagacaccaaatgcaggatttagagtggagaaagatgagattgtaatgaccacagtaattaattgcaaagaatggagaaaatagagcccaagcttaactgtggagatcttatttattgggacctcagtccctgtgccctgggactgagatccctccaggcaggagaaaaaaaacactctactctgtctaccttcagctgccatagttaagtctgagtgccaggttctggttataatcaatcactgacttatttaccatgctgtacagacattccggccctgaatgcacccacagtttacaaggttcatgattttctttgtgcctatatgcctccctcccctcacaccagcaccatgcttatctctttccttgctcatccatgcctgccaacctatatgtcctctcttctccctactcaagaagaacctcctctgaaacaccttctcctttttactttctcctcccttttgcctctaaagtttgtgtatttccagaggcaggcttctcatctcagtctctagtatgtacccaatcgcaagagttcaacagcatccctggacccttcgtctctcctgatgaggcccctttgcagcacttggtttcaatcctacttatctaactcttcctggaaaccctcaatttgtccctcaggattcctaaacaatatgttcaagttgagtttatcatccccttgtctcccgacccatcatatgcttaccagcagtgtctcccacttcaaaccacctcaacctgcccttccttgttaattttctgtctcagtgagagaacttctgtccccctagatacccaaccagaaattctagagttggctcttccacctccctatgtcttccctgtgatattcaataggacttcaagtactgtgcattctgcctcctgaacatctcccaaacctgcgtcctctgcatccccttcaccaccacccttgtcttttcatattgggattctcctacctatgctctctgttttcatcccagaccccctgatctgtcctctctatggccaccagagtcatctctaaaaagtgcaaatccaggagaagcctttgatgactccagattattttaggataaactctaagcttcttctaagcacacaaggtcctgcatttctctcaaaccccacctcttgctataaccacaatgaagtacttgtggttcccaaaggtgctcctctctctaggctcagtgcctttatacctgtcttccaggaaggtcccttatccatatctttgtctggctaagtcttacgtactcttcaagcctcagctcagaacttccttcagggagacttctgtatcagtttggatgttttcagctcaactaacaaaatatccaactagatatttaatagtataataaagaggtttatctccccagtaagatgtctgcagcagcagtttcacagctggttaatttagcagctggaggatgtctgaactctgggctgccttttttttgtcttggctttcccggtacggactcaaaatacatgccttaactctaaacatcagatccacacaaagccatagtcaaaacaagaaaagaagtgaggaattccccttagacacctctcctttttatcagagagaaaaactttcccagcagactttgcatctggttcccttaagatctgggtctcccgtttactgtattcagacgactgacaaagggagaagagttgttgtggcttatctgtgactgcgggaagaaaggtatcttctttgagtacactctgcctcatatagaataaaattagtgttctcttggcaaagacagaggcagagacagtgactgggggaggctaccaacagttttggccatggcttcttcacccagagtcccttgctcatggctctcttaccagagtgagttagatgcttttcaagtactctgttattgtctttccaaagtacagtttagttgttgatttacttacctatttccttacactaacctcctcaaagttggggactgttttatacatcacaattccttggaggacctaagacttgagacctagctaaggcctaaggcctagtgcatagcaggtgctcaataaaaataaatccataaaaagcattgattgaatgattgtatcattgaactaattaattagtaaattgtccaggacactttccacatagtctagaattgtagtgcattaatgctagtaatttgacccaattgatatatggccgatttgtgctatttgctccatgcaatttctattgtcttactgtttttatgactcagccctgtgatttgttacccactgcagcagcaaccaaaggaccatgttcttttttaaatagagtcaatgttttctggtccttcaagcggccatcctggggttattgagacatcttttttttctcttggtccatcagtgctctgccaagccagcctggatcaacatcatctaccatcctcccatctttagggtagaacttcaaaggcagggtttcttttcctaggtcaagttgacctgtaacttccatcttcctcatactaactctcagtttgtagaactgcataagctctgcaaagtggtcacaagcttctcatccagtcagtgccttaacaaatatttattgagggaattaatgaatggatcatttgactgacttgtgtgtaatctgcaaaaacaggcataagcagacaagagttctcatttaaaaggtatgtgcctcagctaaaacaccttttaaaataaccaaaccagcagcttttatcaatgttggcattctttcctcaaactaattatctgcttatataactgaccttattaagggctgttgccaccttcttaagttatctttggacaccaaaatcaaacccaaagacaatttatgatcttgccagtttcaaagactgccattttgatgtgaccagaattccctattgaattcagaaatccaatgcaaatctttgttggaaaagacgaatgtaaattgaatcaataaacgaataataaataaaacagtcgatgattaacttagtcatgaaaataaaaatagaagtgtcaactgaagcaccctctgctaattttctattataagataaacattagctggttgatgaaaatttgtttttgacatttatacagaagatggctccttagcaaaccaaagcactacagaatactgtcatggcaatatcccgtgtgacaatgaggactgtcccatggcagaaatcatagtcaggttcctcgagaatcccctcagcacagaagaaacatcaaatagaatgttctattagaaattaaggtctgtgaaaacaaagtcatagaatcgtgccccagacagccagacaggaatacctcttgatgcagctcccccaagatgtaaaccaatccatgaaacaagggaacagaactgccagcaagcattgcccaccactacgaaccaaaggccaatcttggctcacccagtcataaactcctagaggacagaaacagctagatgatgatattatttgtaaataataaggcttgagctgactctgaaatgcacgttcataaaattgctgagtgaagatgagctttagaacatagttaatccaaattcctcttctaactgaagaaaaaaccaagttttaacgagggaaagggacatggccaatctcatgtggccctctctggggaagttaagactggacccctgggcccctgactcctacccagggctcttcccactttataccataaagtccctaccacattgccctgcctgcggctggctttcaatacaacttgatgaataaatcatgtcaatcttcattatgtatgagcatggtcagatcccggttatgtgggacctataattcagggggagggccttctttaagaaaaaggatgcagactgagcgcagtggctcatgcctgtaatcccagcactctgggaggctgaggcgggtggatcacttcaggtcaggagttcaagaccggcctggccaacatggtgaaacccgtctctactacaaatacaaaacttagccaggcatggtggcacgcacctgctgaggtgggaggctgaggtgggagaattgcttgaacctgggagacagaagttgcagtgagcagagatcatgccactgcagtctagcctgggtggcagagtgagaccctgtctcaaaataaagtaaataaataaataaaataaaagtaggtagaaaagtgaatatttatttagactgtgagaagaaagcataacaaattagaaatataacaaagttgactattaagtatcacaaaatccagaaacctaatatttctattgaataactgctgatatgcttctacaatgcttccttctttcagttcttggcttcatactatgattttcactcttcatatcagaaaaactgtataatcttttctggagagaaaacagttcagtcttctagcaaaaaaaaaaaggttgttttgtattattaatcgcacagaaaagttactttctacttcacaatttgttattgattatcttacataaattttttgggtggttatcaaatttggggaaacttgtatctggttgcttttttaatcagctgtaggatttcagggcatttcttggctaattttaagagtttttagaattcatgacacacattcactagagaaaatgtactttaaaagtccactatattataatgtgctacataatttgtacaacaaattactcttacgatacacaatgattcaaagatgagtacgtgtaggagttttgttcagtagaacatttgttttttcaggctgtttcttgcatgctgtttcatctcgaaccaccagatttcatcaggacaagatacattagattcacaaaactataatgtgatatgcatgcaaaaatatgcaactttacattttgaatggagtcactgcttaaagtactgtcacaggttggtatcctacaaatacaagaattcagataaattctatcttatgagactcccattataataggaaaaactgtaagatgtatgatcagcgcacacactacattactaaagtttatttatttatttttttttttttttgaggaaacagagtcttgctctgtctcccagactagagtgcagtggcacaatcatagctcactgcagcctcaaccttctgggctcaagcaatcctcccacctcggcctcccaagtagctgggactacatgcatgtaccacccttggttggctaattaaaaaatatatatttttttgtagaaatggggtcttgctatgttgcccaggctggtctaaaacccctggcctcaagcaatcctcccacctcagcctctcaaagtgctgggattatagatgtgagtcacagtacctggcctaaagtatatttctaacagaagagaacttcatttcgactaagagttgatgcgcatctagtttcctaattataattttacacatctggtaataaaagaaattttcacaggttagtgcgaatacacttcaaaccttgtttctcccccgctattttgggactaggcactgaaggacacaagcacactatggtcatactgtggtgtggtctccagccttgcactgttgtgtcacttcacccagtgagtgagcacagtgagtgagagaaggatttcagaaagtcatctgcaccggagagccagcagtaatggaacaatacatgcaagtaactgcaaactatgtaaatatatcccactaagttaaattaaatgtctctccagctttacattaccttggcaggatcccagaaagttcatagtcatgttagtcacctgacccaagagaaagacagtgctcttaattgatcatggttaaaataccactttgcaaattttacaaaaatgtatcatcatgtggacataaagctggaaacccacccatgtccttggaatgggcttcctcagtgaggggccctgaagcttttgcttcatgaggtttgtggtcattcttttcctatgtaatggcctttctatgactgctgcgcaaagacaggaaaacaatcagcagtatcatatttaaatgtgaaggacaaggattgagcatatggactgctggaacatgtattccttttgtagggctgccattacaaagtaccatgaactaactggcttaaggcaatggcaactggttggctcttagctctggaggctagaagtctgaaatcaaggtgttggcagagccatgttctctccgaaggctctagggaagaatgcttccttgcctcttccaccttctggtggttcctaacaatccctggcattccttgtcttgtagatgcaattccttgtctccaatctttgcctccatcattacatggtcctgtctgagtgagtctgtgtcccttctcctcttcccataaggacactagtaatactggattgggggcccactctaatccaatatgacctcatcttaactaattacatctacaaaaactctattttcaaataaggtgacattctgagatactggagttaggacatcaacatatcttttttgagtgacacaattcatctcataacagaaaggaaacaatgctgtcttcactatgtattggttatctgtatgatcctaagcagctcaaatttgtcattcaacaaacatcagttagcactaagtgtgtgctggggatactgagaagagtatgatcaggcagccactcttagagagctcccagtctgggagagagataaggaaactagcagtgcaatgcagagtggtggttgctaaactggaggcatgtgcacacagtgagataggcccactaaggacagagcctgagagcatgagggtttgaggggctctacaaaacgtggcctgtttgaacagagtctttaagaatgactagatgctcaccaaatagacaatggaaggcagaaaattccaagtgggagtaataatgcatgaaaaggcttggattaatggaaaattgttcatttgaggaaattttgtgttattttgtgcgactggaaggaaagtgtcctttgacatggcagattaggccagaaaaatagggggactcaggtgatgaagacacaggaaagtgtgtggagggtgtgtgtgtgtgtgtgtgtgtgagagagagagagtgtgtgtgtgtgagacagagagagagagagtgtgtgtgtgtgtgtatccacatgtgagccaggggtagagccaaccatggttagaagtctggtctttatctaataagggggatgggtaccaaaaggaaaataacttgactgggtttgcatttcagaaagattgctggggcatcagcgtgaaaggtggatgagaaggaaaaggagagcaaaatggtctctctctctgacaccctcgtttggctaggcaggttcacacaggctatcttctttaacctcttcaaccaccctttcagatacacttgaaaggtgtgggaactggggcacgcagcagaggaaaatacccacagttcataatcagccagctattggctactcggtccattggctcaaggcatggcagtagtccatggaagaggccatcggagcctgacctaaggcaagaagcagcgtgataaggaggagaagatggaggcaaagaatgctcagactaaattcccatccatggaggcatggagggcaagacagatggcctcactgggcctgtttcttcatctgtcatgtggggaaaacaggccttactaatattcccacagcctcaggtcgagtgatgaccactataacagaacaccttgaggagatgaaacgcacagggtcacctgagcattgccacagaggagagctttgtttttgtcactttggcctctttttctggagtattcacactgtaataaagctaaaatcatcccagggattatccagggaaaaggaaaatttcagggagggagaataagggcaggaattgatctagtgcctcagacacaggaaagtgtgtggagggtgtgtgtgtgtgtgagagagagagtgtatatgtgtgtgtgagagtgtgagagagtgtgtgtgtgagagtgtgtgtgtgtgagagagagagagagagagtgtgtgtgtgtgtgtgtgtgtgtgtgtgtatccacatgtgagccaggggtagagccaaggcttcttctttgtctttttcttgtgtttttattttcccctgcctttctctctctttctttccttgtcttttccttgtcttcattttcttttcctctcttctcttttcctttcttggatctattcctttctggggtatctctaaaagaccccgaaccccctgcaaaaaacaaacacaattattccatgaaatctcttatttggttgagatattgctcttcaaatttatcccaccaccttaaaaataactacaatgcttgctttaactttggtagtcttatctctgccactttgatgtcatttagcttatataagggcaagatggcagaggtggtgttttgttttcttttgttttgttttgttgttaaattcttccctacttctatttcctagctctctctatatttggagtttaagtgtagtggtggctgattttgagttcctttttaaatctaatccagtataaatattaacctgcttaatatttagacatttataggctcactcagcttatgtttggtacttattttttgtttgttttgtttttatggagacagagtctctctctgccacctacattggagtgcagtggtgtaatcacaactcactgcagcctcaacctcctgggctcaagcaatcctcccaactcagtctcatgagtagctgggcctacaggtgtgcccactcatgcttggctaatttttaaatttttttatagagatgaagtcttgctatgttgcccaggctggttttgaactcctagccttgagacatcctcccaccttagcttcccaaagtgctgggattacaggcgtgatcccacagatcatgtttggtattttaaagtaaaaacaaatgtgagttggaggactaaagaaattgttagcataaatttatctttatgagatcatttgtattacttgtgattatcttcccagacaccagagcttgagcatgaaaagtcaggctccccaggcctcataggatagagaagccctcagggagtgcagtgggtcttcccctgaccccacctccagaaatgccatgcaggtgaattgcttaacatatatactatattaattttatattctcataggcacatcattgcatgcatcagattaactctattaaaaggcttattaaattgtgataataaattaacttcacaaatcctcaatcgtttatatttgttgcttattgatacgtttactcatacatgttaaggattgaggaactttatgttccaccctaccttttcattcatgcatgcatccatcagtcattcttcattttacaaatgtgtattaagaaactactatgtgctatgctatgaggataaaaccataccataaaatgataaaacaagtgaatttagtgaaaaattcattgagatgtttatgccctatataaatgtgttatgtataactgtgttttctcttttatgcgcaaagatgatccctacagcctgccatcagcaggacttgtaccttagctactttctggtcatggcatggggtgccctaaaccatcccttccataccccaggccctgtgtgatcctagatatgtgcaatgcttgtattctgagactccattcactcatacactccagacctgggtctctacatacacgggtgctgaagattttcaaatcatttaaaagttagggatgtctgcttttatcctacaaaaagtacctaaactacctttcctttaaccacaatggtcacattggttgtgtgtgctaaaaccattgattttccaaatatagtgcctgcatttagcaaagagagtaaattccccttagttgccacaaagccaaacaatactgggagaagcctgcctattgaggtggagctgatgctggggcagagggatgagctctggccgcaagttcattgtggcaggcagactttcggcatgtgagggactaagcccagacaacaggggagccagcatgctgatgcatgaccaaaatacagggaaagagagtgtaggaacagacaatactcagaaacacacgggcaggcagcagggccaagcaaagtctgtcggcagacacagagaccaggctaagctgctggggcagggggcaggcatcagatgagtgcaaaagaagcttccctcaggaagacagaagagggcaatgatagagttgactccagaggcagacagaggtaggtgtgaatcctgatccagctactgtgtaactatggaggaaaccactggtagatttcttttttttttttttaattatactttaagttctagggtacatgtgcacaatgtgcagctttgttacatatgtatacatgtgccatgttggtttgctgcacccattaactcctcatttacattaggtatttctcctaatgctatccctctccctgcccccgacctcatgacaggcccccgtgggtgatgttccctgtcctgtgtccaagtgttttcattgttcaattccaacctatgagtgagaacatgtggtgtttggttttctgtccttgtgatagttgctcagaatggtttctagcttcatccatgtccctgcaaaggacatgaactcatccctttttatggctacatagtattccatggtatatatgtaccacattttcttaatccagactatcattgatggacatttgggttggttccaagtttttgctattgttaatagtgctgcagtaaacatatgtgtgcatgtgtctttatagtagcatgattcataatcctttggttatatacctagtaatgggatggctgggttaaatggtatttctagttctagatccttgaggaatcgccacactgacttccacaatggttgaactagtttatactcccaccaacagtgtaaaagtattcctatttctccacagcctctccagcatctgttgtttcctgactttttactgactgccattctaactggtatgagacggtgtctcgttgttttgatttgcatttctctgatgaccagtgatgatgagcattttttcatgtgtctgttggctgcataaatgtcatcttttgaaaagtgtctgttcatatcttttgcccactttttgatggggttgtttgttttttttcttgtaaatttgtttaagttctttgtagattctggatattagccctttgtcagatggatagattgtgaaaattttctcccattctgtaggttgcctgttcactctgatggtagtttcttttgctgtgtagaagctctttagtttaattagatcccatttgtctattttggcttttgttgctattgcttttggtgttttagtcatgaagtccttgcccatgccaatgtcctaaatggtattgcctaggttttcttctagggttttttacggttgtaggtctaatgtttaaatctttaatccatcttgaattaatttttgtataaggtgtaaggaagggatccagtttcagctttctacatatggctagccagttttcccagcaccatttattaaatagggaatcctttcctcatttcttgtttttgtcaggtttgtcaaagatcagatggttgtagatgtgtggtgttatttctgagggctctattctgttccatgggtctatttctctgttttggtaccagtaccatgctgttttggttactgtagcctggtagtatagtttgaagtcagcgtgatgcctccctactggcagatttcacacctgaatcctcttcttcgtgaacacacatcccttgttgttagttgtggcaactaactagacatgactgcattttagccaatgcatggtgagtggaagcaatcgggactggtcctccactcaattctccatgctgctgcaccattgggttgaccttggagttgagaggtaaaactataagatagatggggcttggcctctgaataatcactgcttggaggaaagccctggccactcagaaacatctgctctggatttcaggtgaacaataaatgcatttctattgtgttgaaactgagatttagggggttactgttactgtagcgactattaccttaactcatacaataacttagacaaattacataaccttgctaaagctcatctgaaaatttagaggaatattaatcaaatgatttcctatcactcttcagcaacctgggattctctttcctagatagtttcctgttccatgatatcgcttcacagaggctctgcttttatattgctgatacttgagaaaggaattccttggccattctctctaaaacactactcttctcttgcagcatccaccatcatttttcttctaaatttatcttcccctcaattttattgacatataattggaatacagtaaaatgtacatattcaaaccatgaatttaattagtttttccatgtgtgcataccttgccctgatttaattttcttcttagcatttatttctaccgatttatttgtttgtttgtttataacctgtcttttccattagaatatgtttcattagaatgtaaataccataccttttgggcagcatgggtgactttatgtgggagctatagtcctaggctggctctcttcatggttttcctacatctaattcatccaagagcaaaaaaagccaaataggttctctcctgcctgctaatcctaggcagttggatacagctgcatggagcaccgagttgaggggaattctaagattgcatttatctgggcttagcagaaatgagaatggtgatccattaatgatgcctacctcgagtaggaaagtaggaagtgtcacaggcatatttgcaattattttcctagaaactattgtggggctgaccctgctggtgggggtcaaatcatctcagctgtgggaggaagtgagccacagaggctgggaaaaggcaggacctgacagtaacattgctgaaatgccatttaccgcctgcactggctgtgattacgcaaaggctggcagttgtgtgattaaatacactgagatgaatagtctgaatgggctttgggctcctggcttttttcctgatgattttcaatgggtaataataacatggtgataacttccacataggaagaggacacaagggcacaagaggactttcatgcccaccttaaccaggcttgtgcttaccctgacaatggttgcatctcactaaattggtacttatgcaagcccccttttcattccagcagcatgatttctttccatgggatgccttaaagcaaagcacctagagcctgatgaagcctcgtctgacagtaattgaagatacagactaaaccctcaaggtttgaagctcgccacatgtaattcagccttgttccagcaagccataaatctgagatgtctccttttatcataaagtgtctcttgcaaaatcattttctgtttgtccaagaccaagcttcaagagatccactttactgcagccagatctaaagcctggatgctgcctaatattctctaaagccttggaatttgaatagctcagaggctgaaacacaatatacattaagtgcttaacttcttcaggtatcccctcaaaagccactgaatctcgctgctgtgcaagtctctccttagtagaaagtcaggaacccagtggtctttcctaccagtcttcagagtcacttgtaattgtaaggaacatggctgtgctttcgtcaaggataggccgaggtaaacatccaaagtgactcagcgagtttagagtgcaggcatataactccacttgttatcacagccatgtagccataacatgggaaggcttatcatttggctctaagccactattgtctgtaaaatatataattgccctgctgacactgtacaggtgcgctcatgcccagagagagacagagttaagctactgaccctgaaggcgagggagagctggccgtacagctgtgcatgggagtggctggctcaagcagccaagacagagcagacagtgtaagacagctgctgataagagagctgctgaatgaagctgtatttcagctacctacggccccccatcgagtgttctttcagctatctgccattcgtccccccactcccttcagacctcagcatgggctggaacctgaacttgaacctaacagcaaccctttaatgtatgcagtggcaatggttagggattctatcacccatcattgccagtatgacacccacacccaagctagcgtgtatgtgtgtgtattcatatccgtgctcatttttaagtcttttaattctttcaatacacttttattatattttccacctaattttttgtatttttaaaatgttttactaggtacctcttatttttgaacactattttgatattttacttcattattaaaatgattgctggtatataaaaatgtattgttttgctgttattcttgtttttattggttgtttatccaatcattttgctaaactttcttattaatcttaataatttgtctgtagattcttttagatttcctatatagaaaattttatattctgttactaatgactcttaggatgcttccttttcaatcttcccttactgaacaggtcagcatcactgaaatagaagtacatgaaatagaagtagagatgataagcactttagtcttattctgatattaaagaaaatattttcaatagttttcctttttttattttattttatttattttattttttttgagacagagtctcccactgtcacccaggctggggtgtagcggcacgatctcagctaactgcaacctctccatcccagttcaagcaatttttgtgtctccgcctcctgagtagctgggattataggcatgtgccatcacgcccagctaattttttgtagagatggggtttcaccatgttggcgaggccagtctcaaactcctaacctcaggtaatccactaccttggcctcccaaagtgctgggattacaggcatgagccaccacacccagtcaatagttctccatttcttatcatgtttgctgttgggatactttagcctgatttttgaggttaataaagtttcttcctatatctagttgctcagtgtttatattgtgaatatatggtgaattttagcaatacatttttccattactactgagatgactttgtagttttcccctttaatttattaattgactttctaatgttaaactaatcttaaaagtctttgggataaatccaacttatccatggggtattattcttttcatgcattgctcaatccagcttgctgatattttgtgtagaatgattgcctctatgttcgtaaatgccactgaactgtcatttgtattttttgtactgtctttgtcaagttttggtattaagagtatgctagactcatatattctacaagaaattttataaaattgagattatttgttcattgaatgtttaatagcgtttaacagtaaaattgtctgggcctgattatttttggtgggaatacttcatagtactcattgagtatctttattgattataaaattattcatagtttctattttttcctgaatcagtttgttgagttatattttcctagaatttgtcagtttcatctaaatttttaaattgattggcattattcaaaagaccttatttccatcttaataattgcagcatctgtaatcatatctttacatttataatattaatttgtacctcctatctctgccattaagttttcagtgtgtcaattttattagtcttttaaaaacactttggctttgctgatctttattacatgttcattttctgcttctatctttgttatttaattccttctacttcctttgggtttattttgctattctttttctaacttcttaagaggaatacctagttcattaattttcttccacgattcttgtctgactatgccttagactataaatttttccccaaatatagcttcagtgaaaacctaaaacttttcataagtaatattttccattctatttcattctaaataggctgtaattctccttgttatttctcctttggccttggaatgtttagaattatgtcttcaggtgtctaaataaataaaatttttgtcatatttttcttttttatttttagcttaattatactatgattagagaatatgacctatgtgattaaaatcttttaaatgtgttgagccttgccttgtggactcatatgttgttgattttcataaatgtttcttgtgtgcctctgaagtgtgggtttcctgaaactgattgcagtatttcatttatggaactgatctatgattatatgaaacttgttaattgtgttatgcaaattttatctatccttagtggttattttcttagcctgcttgtcttcttactaaggagatatattaaaatctcagctgggcacagtggctcacacccgtaatcccagaactttgggaggctgaggtggaggatagcttaaggccaggagtttgagaccaacctgggatacataacaaaaccctacccctacaaaaaattttaaaagataaaaaaaaaaaaacctctcactgtgatgctggatttgcctatttttcattgaagttctgtaaatttttactttatctatttcgaggcagcatttttaaggtttgtataaactttattattatatctttctattgaacttaaccatctcgaaatgaagatattcctccactagaaatatttttcccttatggtttattttgatattaataaagtgaaaccagttatctcctaattagcatttgctcattgttccttttgcctaagcagtaaatgaataaactacattttgtttcctatttgatatggtcatatttgccttttcattggaatgtttagttcattctcatggattataactactgatatatttggatttatttctggccattttaactctatctgccataactcttaacctctcttttatcttttccatctctttttctgtttctacattctgaataatttcttctcttatcttccagttgactaattctgcttagcggtaactaataaattgttaaaaacaatacatatgttaattcaattataatacttataattttatgcagttctgttttattctatttcagatttgcttgcctgatctttttttgttattgttgttttagtgacatcttttttttttaattagtgactttttaattttttattatactttaagttctgggatacatgtgcagaacgtgcaggtttgttacataggtatacacatgccatggtggtttgctgcacccatcaacctgtcatctacatgaggtatttctcctaatgctattcctccccttgctccccatcccctgacaggccctggtgtgtgatgttcccctccctgtgcccgtatgttcttattgttcaactcccacttatgagtgagaacaggaggtgtttggttttctgttcctgtgttagtttgctgagaatggtggtttccagcttcatccatgtccttgcaaaggacatgaactccctctttatggctgcatagtattccatggtgtatatgtgccacatttcctttatccagtctgtcattgatgggcatttgggttgcttccaagtctttgctattgtgaatagtgctgcaataaatagtgcacactgtgaatatgtgcatgtgtctttataacagaatgctttataatcctttgggtatatacccagtaatgggattcctgggtcaaatggtatttctagttttagatccttgagaaatcgccatgctgtcttccacaatggttgaaccaatgtacactcccaccaacagtggaaaagacttcctatttctctacatcgtctccagcatctgtgttttcctgactttttaatgatcatcattctaactggcatgagatggtatcttcatgtagttttgatttcatttctctaatgaccagtgatgatgagcttttttcatgtgtctgttggccacataaatgtcttcttttgagaagtgtctgttcatatccttcgcccactttttgatggggttgcttgttttctttctagtaaatttgtttaagttccttgtagattctggatattagcccttcctcagatggatagattgcaaaaattttctcccattctgtaggttgcctgttcactctgatgatagtttattttactgtacagaagctctttagtttaagtaaatcccatttgtcaatttttgcttttgttgccattgcttttggtattttagttatgaagtcttgcccacgtctatgtcctgaatggtattgcctaggttttcttctagggtttttatggttttaggtcttacatttaaatctttaatccatcttgagttaatttttgtataaggtgtaaggaaggagtccagttccagtttcagttttctgcatatggctagccagttttcccaacactatttattaaacacggaatcctttccccattgcttgtttttgtcaggtttgtcaaagatcagacagttgtagatgtgtcatgttatttctgaggcctctgttctgttccattggtctatatatctgttttgggaccagtaacatgctgttttggttattgtagccttgtagtatagtttgaagtcaggtagcatgatgctgccagcttaggattctcttggctatacaggctcttttttggttccatatgaaatttaaagtagctttttccaattctgtgaagaaagtcaatgacagcttgatggggatagcattgaatctatacatgagcatggaatgtttttccatttgtctgtgtcctctcttattccctgagcagtgctttgtagttctccttgaagaggtccttcacatcccttgtaaattatattcctaggtattttattctcttcatagaaattgtgaatgggagttgattaggctgtctgtctattattggtgtataggaatgcttgtgatttttgcatattgattttgtatcctgagactttgctggagttgcttatcaacttaagtagttttggggctgagatggtggggttttctaaatatacaatcatgccttctacacacagagataatttgacttcctctcttcctattcgaatacgctttatttctttctcttgcctgattgccctggtcagaacttccaataccatgttgaataggagtggtgagagagggcatccttgtcttgtgccggttttcaaagggaatgcttccagcttttccccattcagtatgatattggctgtgggtttgtcataaatagctcttatttttttgagatacgttccatcaatacctcgtttattgagtgtttttagaatgaagggctgttgaattttgttgaaggccttttctgcatctattgagataatcatgtggtttttgtcattggttctgtttatatgatagattacatttattgatttgcatatgttgaaccagccttgaatcccagggatgaagtcatcttgattgtggtcgataaactttttaatgtgctgctggattcagtttgccagtattttatcaaggattttcgcatcaatgttcaccagggatattggcctgaaattttctttctttttttattttattgtgtctctgccaggttttggtatcaggatgatgctggcctcataaaatgagttagggaggagtccctctttttctattgtttggaatagtttcagaaagaatggtaccagctcctctttgtacctctggtagaatttggctgtgaatccatctggccctgggctttttttggttggtaggctattaattactgcctctatttcagaacttgttatcggtctattcacagattcgacttcttcctggttcagtctcgggagggtgtatgtgtccaggaatttatcaatttcttctagattttctagtttatttgcatagaggtgtttatagtattctctgatggtagtttgtatttctgtgggatcagtggtgatctcccatttatcattttttattgcatctatttgattcttctctcttttcttctttattagtcgagctagcagtctatctattttgttaatcttttcaaaaagccagctcctggattcattgattttttgaagggtttttcatgtctctaactcctttcgttctgctctgatcttagctatgtcttgccttctgctagcttttgaatttgtttgctcttgcttctctaattctatcaattgtgatgttagggtgtcaattttagatctttcctgctttctcttgtgggcattcagtgctataaatttccctctaaatgctgctttagctatgtcccagagattctggtacattgtgtctttgttgtcattggttgaaaagaacttatttatttctgccttaatttcgttttgtaccctgtagtcattcaggagcaggttgttcagtttttatgtagttgtgcagttttgaatgagtttcttaatcctgagttctaatttgattgcactgtggtctcagagactgttatgatttctgttcttttgcatgtgctaaggagtgttttacttccaattatgtggtcaattttagaataaattcgaagtggtgctgagaggaatgtatattctgttgatttgggcaggaaagttctatagatgtctattagatcctcttggttcagagctgagttcaagtcctgaatatacttgttaattttctgtctcattgatctgtctaatattgacagtggggtgttaaagtctcccactattattgtgcaggactctaagtctctttgtagttctctaagaatgtggtttatgaacctgggtgctcctgtattaggtctgtaaatatttaggatagttagctcttcttgttgaattgatccctttaccattatgtaatgcctttctttgtcttttttgatctttgttgctttaaagtctgttttatcagagactaagattgcaactcctgctttttttggctttccatttgcttggtaaatatttctccatcactttattttgagcctatgtgtgtctttgcatgtgagatgggtctcttgaatacagcacaccaatgggtcttgactgtttatccaatttgccagtctgtctttatattggggcatttagcctgtttacatttaaggttaaaattgttatgtgtgaatttgatcctgtcattatgatgctagctggttattttgcccattagttgatgcagtttcttcatagtgtcaatggtctttacattttggtatgtttttgcagtggctggtaccagtttttcctttccatatttagtgcttccttcaggagctcttgtaaggcaggcctggtggtgacaaaatctctcagcatttgcttgtctgtaaaggattttatttctccttcacttctgaaacttagtttcattggatatgaaattctgggttgaaaattcttttctttaagaatgttgaatattggcccccactctcttctggcttgcagggtttctgcattgagatccactgttagtctgatgggcttccctttgtgggtatccagacctttctctctggctgcccttaacattttttccttcatttcaactttggtgaatctgaccgttatgtgtcttgaggttgctcttctcgaggagtatctttgtggtgttctccatatttcctgaatttgaatgtcagcctgtcatgctaggttggggaagttctcttggataatatcctgaagtgtgttttccaacttggttccattctccccatcactttcaggtacaccaatcaaatgtaggttttctcttttcacacagtcccatatttcttggaggctttgttcattccttttcattcttttctctttaatcttgtcttcgtgctttgtttcattaagttgatcttcaatctcttatatcctttcttccacttgatcaattcagctactgatacttgtgtatgcttcacaaagttctcatgctgtgtttttcagctccatcaggtcatttatgttcttctctaaactggttattctagttagcactttctgtaaccttttttcaaggttcttagcttccttgcattgggttagaacatgctcctttagcttggaggagtttgttattacccacattctgaagcctacttctgtcaatttgtcaaactcattttctgtcctgttttgtttccttgctagcgaagagttgtgattcttcggagggaagaggctttctggtttttggaattttcagcctttttgctctggtttttcctcatcttcatggatttatatacctttggtctttgatgttggtgaccttcggatggggtctttgtgcggtcatcctttttgttgatgttgatgctgtcgctttctgttagttttccttctaacagtcaggccccccttctgcaggtctgctggagtttgctggaggtcactccacaccctgtttacctgggtatcaccagcagaggctgcagaacatcaaatattgctgcctgctccttcctctggaagtgccccagaggggcacttgccagatgccagcaggagctctcctgtatgaggtgtctgtcgacccctgctgggaggtgtctcccgatcaggagactcaggggtcagggacccacttgaggaggcagtctgtcccttaggagagctcaagcgctgtgctgggagatccactgctctctttagagtcagcaggcaggaatatttaagtctgctgaagctgcacccagagccgccccttcccctgggtgctctgtcccagggagagaagagttttatctataagcccctgactggggctgctgcctttctttcagagatgccctgcccagagagaaggaatctagagaggcagtctggctacagtggctttgctgagcagtggtgggctccacgtagtccaaacctcccagtggctttgtttacactgtaaggggaaaaccgcctactcaagcctcagtaatggtggacgcccctccccccaccaagctcaagtgtcccaggtcgacttcagactgctgtgctggcagcaagaatttcatgccagtggatcttagcttgtagggcttcttgggggtgggatccactaagcaagaccactcagccccctggtttcattcccctttccaggcgagtgaacagttctgtctcactggctttccaggtgtcactggggtatgaaaataactccttcacctagctgggtgtctgccctaatggccacccagtttcatgcttgaaacccagggccctggtggtgtaggctcccaaaggaatctcctggtctgcaggctgtgaagaccacaggaaaagtgtagtatctgggctggatagcaccgtccatcatggcatagtcccccatgacttcccttggctaggggagggcattccccgaccccttgcacttcccaggtgaggcgacgccccaccctgcttctgctcaccctctgtgggctgcacccactgtctaaccagtcccagtgagatgaactggatacctcagttggaaatgcaaaaatcacccaccctctgcattggtctcgctggcagctgcagactggagctcttcctatttggccaccttgcccagaaaaaaaatgttgcctattctttatagattctttccactgctcatattttcaagcttgtctcttactttattaaatatgtttactatagcgatccagagtatttttaggtctgtttctgaagtctgttcgttctgctgttgctttctatccttgtgattttttaactatgagctgctcagtttgcttgaaaatttatctctggaaattgcttaagggcctgggatgacgatgggttcctccagagataacccacattggcttctgccacactcctggaggcctgtcattataagtctaactttaaatcacattcatggctcaatgttttttgagctgctaattccgtttaaattcagacttcaaattagcatgaggcccactgtgtggctaaaaattctgagaggacttttcctctgattagcaccaagttttgagacaattaatttcctctgcagataggggagagaggaaggataaaaccaaccccttagggtcaccgctttttaaagagagggtctattattaatttcccaccttgtacacaccctgggttttctcctgttccctgttttctatgaggccatgaaaaaaaaaaaagattaagtttatcaggatcagcaactctacacaaaacatcataagcccaattgtggttctcagtaagtaaaaccaggtcaccctctgcttttacaattaccatattgtatatctaaatgtcaaaaattatctgacctacattttcagtttagtgatttgacacaaatccaaagatggtgtgtgtgtttcaataatacagccactacttcagagcttcataattcagtacaaaggagaaggcactaatgagagtcaggggctgggaaaacattgtgtgatacatacaggcaacattctcgataatatcatagaagaaaaaaagcttagatcttagacatctcaagtgcagcctcttcgttttacaaataaggaaacaatagatcagagatgcaatgtcatataacatattacacagctaataaatgtcagagccatggtcagagatcatctaactttcaacttagtctttcttcctcataaaactgtggtttctaaacttgagtaggtaggataaaacttccccatgagtcactcctcaaaggttctttgatcaaataaatttaggaaattctgcacaccataactccctcttagagacttagaagccatacaacatacctagggctcagaaacattgtgaagtaaagaattctacataactattacttcacaaagtaagttaaccataaaaatctttttctacagaatacttgctaatactgtacagggcactggtgtttcccaaagcaaattaggaaatggtcccttgaaaaatcatctcagctactttctaagtagcatgaaactctgcagttattacatccccaacaaaacaaaacaaaaaatcctcctgcacatattattttattacatttgaagttggcatgcctagaggcatagatcaaaattttgcctcatcagttatttgaactttcaattgtgtaaatagaaaattttaatcttttaaaaatgaattagagaggacttccacttccaactataatggattacctcttatcagaccacctctcctactaaaaacaattcccaatgttgaatagaatattagaaacagctgcttaaagatatcagtaatcagttaaggcagccaaaagttgctgggccaagaccccagggaggagggaaaggcatttctgtgagcctttcttctctgccaatttgtaaatgaagtagagtcaagaagccaaccaaaacgtaacttctcagagctttttgcagtttcatggagctacagaaacaaaaattgaagttttaggtgacaaataagtcagtacctaaagtcctaagatactacagaaaaggaaactacaggtaagagggccccatattctgtctgtgtgacttttctcaatgaagaatttgctgattctcaagttgcacaataaacaaaacaacagctaagaggaaaaagctaagcagaactcttaggattctcacggtgctaggaaacaaaagtagaggttagggcctgacaagagaaggggccctagtaagcacagaagactttccaatgacagtcctgaagggttactctctagaagacaaaaactggaaatatattagcctttaaaaagactgaaatccagcttggaatggtatgatttgcaacaggatcaaggtcatctgtgacttctctaactgctacaagaaaagttaaccctctctgaaaaaaaaaaaaaaaagcctctacaatttctcatagagatattctggccttgaataaaaagaaaatttacagatatgccaagagaaaggactgtatgactaaaaaccaaagggaaaattagataataggaatagacctacaaatgctacagataatcaccgtcagatacagacttttaaatcactatctttgatatcttcaacaaaatagatgaaaatataaaaatttcactagagaactagaatctataaaagcatgaaatgagaattataaaacgaaaaaatgcaattactaaaaataaaatccccatagtgaaattatcaggaaactagatacagcaaaatacaggattagtaaataaatgataggtccatagaaactgataggccggtctgcagaacagcaagggaaaagaatggaaaaatactgaacaaaggataagaaacatggaaagtggtagaaggtctaacatattgtaattcacctcccagaaggagaagatagagagaatagggtaaaagcaatatttgaagagatatttaggctgagagctacctaaaataaaggcatcaaaccacaaatttttaaaattctacaaattttaagtagaataaatacaaagaaagccatacctaaccacatcatagaaaaattgtgataaacaaaaccaaaaggatatcttaaacccacttaggataaaatatgcattactttcaaagataaggtaatctttgcagttgactaccaacagaaattatggaagcaatgttgtctttaagttgttaaatgaaaataactgccaatatccagtgaaaatgtccttcaaaaataaaaacaaaataggctgagtgcagtggctcacacctgtaatcccagcactttgggaggctgaggtgggtggataacttgaggtcaggagttcaagactagcctggccaacgtggtgaaaccctgtctctactgaaaataaaaaaattagctgggcatggtagcacatacccgtaattcctgctattggggaggctgagacatgagaatcgcttgaacccaggaggtggaggttgcagtgggctgagatcacaccactgcactccagcctgggcaagagagtaacactctgtctcaaaataaaataaaagcaaaataaaacattttcaggcagaaaaagagattgaaattgtcatcagaccacctaaaggaaatactaaagcgaattctttaggcagagaaaaatgatcctacatggaacatggaaatacaggaaagaatgaagatcaatgggaagaataactttattgatacacctaaataaaaattgactgcaaaaaaaatgataaagatactttgattttaaatatatgtataacaaaaatacgtgacaaaaatagcaaattcagaaagcaataaaaacaattgaagaatactaacattcttgcattatttgataaatggtagcagtactaatttataatgtgctctaataattcaaggttgtatatcatagtctattgaataatttaatagaacagtaaaaaaaaaatagctatgactaacaacctaatggagaatagatgaaattttaaaatttggttaggccataggtaaattttaaaaaggagaaaaacaggaaacaagaatgtatgagaaggccaagcacaccggctcatgcttgtaatcccagcactttgggaagcagaggtgggtggatcacttgacgtcaggagttcaagaccagcctggccaacatgacgaaatcctgtctctactaaaaatacaaaaattagctgggcttggtggcgcatgcctgtagtcccagctactcaggagactgaggccggggaatcccttgagtcaaggaggcagaggttgcagtgaaccaagactgtgccactgcactccagcctgggtgacagagtgagactctgtctcaaaaaaaaaaaaaaaaaaaaagcgataagtagaaaaaaaggacaggacaaatattacaaatacaacaataattacattgttaatatatgaaatgtactttaaaaacaaagcttgttagattgtattgtagataaccaattacatgctgatgacattaaatgggggaacaaagttgatgtagctttagtaatgtcaaacaatgtaaactttaatgcaagaagattatcagaaatagagacattttataatgaaaaagcatcaatccactaaaaaagacaaaacaatctcaaatttgtttgcatctaatagcattgccttaaaacatataaaacgaaacttaaaacctaagggagaaatagaaaaatttacgatcacagttggtattttaatacatctctcttagtaactgaaagaacagacaatgaattagcaaagatatgaaagagttcaacaacacaaataatgaatctgatctaaatagcacatacagaacgctctgcccaaaaaactgaaagatacactcatttttcaagtgcatatagaacatttacttaaactgactataaactgggctgaaaagaaagtcttaataaattttctaaaattaaaattatataaaatgttttctgacttcattaaaagaaagccataaatacataataaaaatacagttagactatatacatttagaaattttaaaatatatttataaatgacccatgggatcagagagaaataaaaacagacattggaaaataactttaactgattaataagattataacatatcgaaacttgtgagatgcagcccaaggtgtgtttacagataaatatatagtcttaaaatcatgtattagaagggaattaagcttgaaatttaatgatctaaatatccatctcaggaaagttttaaaagacataaagatcatgtctttctcagggacatgaatggagctagaagccgttattcttggcaaactaactcaggaacagaaaagcaaacaccgtatgttctcacttataagtgggagctgaatgataagaacacatagacacatgttggagaacaacacacactgggtcctgtcgggggtggtggtggggagagggagagcatcaggaagaagagctaatgcatgctgggcttaatacctaggtgatgggttgatctgtgcacgtgtttacctatgtaacaagccctcacatcctatacacgtacaccagaatttaaaataaaagttgaagaaaaaaaagaaatggaaaaaaaaagacataaagaacagaaaattaatgaaacagaaaacaaattcagagaaaacttacagagacaaaagttggttctttaaatagaactttataaactctataaacccctagcaagaatgaaggaaaaaaagagagaaaacacaaattaccaatatcagaaatgaaaacagagacatcatttcagatctaatagatatttaaaaggtaatatgtgtatattacaaacaattttatgccaatacaattgaaaatttagatgaaatgggcaaagtccttgaaaaacttaatttaccaaactgactcaaaaagaaatagacatatagcaatagaaatatgaatagccctatatttatgaaagaaattgaataatatagagcttcccactttaaaaaacaagctcattttaaaatgcaaatctggatggcttcaccaatttttctaaacatttaaaaaataatgttaaatttatacatattcttccagataaagaaataaaatagtctgtatgtccccatttgtatcatgaagccaggataaacttgatactaaacctcacagaaaacaattaacaacaaaatccctctcatgaaataaatacaatgttagcaaatccaattcaacagtaggtaaacatatcatacaacacaatcaagttggatttatttcaggaatggaaggttggtttaacattccaaatcatctttctaattttaatctcaatagatacagataaagtatttaataaaagtcaacatacatttactataaaaattcaacaactaggcacagaggtgaatttcgtgataaagtaaatttcctgattaagtaaatttatcttatgaaggtgtatacaaaatgccgacagccagcaccattattgttttgagttattaagccattggataattgttaggtttgaagcccatccttgtttacttttctttgttattgggggccaggactctgcaaatcacattttcactttgccagcagaatccatgttcagctgtgccaataaggggcataagagggaggctccaaggctggaggaggaaaaaggttttctccctcctgtttgctttccatttatgtttgtattaatgcaccagaagttcttcatcctgacagcaacagttgttcctaatagtggctgttggtgccactctgcagttttttcctactttagaatctgtctcaccatgcccctccagggatcccaagaccaactctggagttgctccttcccaagacctaagactagccctggagttactccctccttcaagattggaaccccagctccaaggaaccctcttcaaggttcccaagcaccagcaccaatcaggcagtgagtgacctgcacccaggggtctatgatctgaatccatggagaccctcatctaagcttttaagttttatgactaccaacctcttctctttgttttcccagcactggactagtagctgtttcctgttgtaacaacaacctctgtgatacctactgtcctctctgccttttctcttctctgaaatgtggttaacaattcttcaaattaaattctccctcttaaaataactggcatggtttctgtgtcttaactgatgctgactgatataatgcataatggtaaaattttgaaatctcctcccagtgaaaatgagaattagcaaggacactgctgacatctcttctatgaagcaatattctgagagacccagccaggacagtaagaccagaaaaaaaaagtaaaaggtaggaagattgggaaagaaataaaattcttatgacaatgtgattgtatgcacacattgtatacaaaaagatgtacctataaattattaaaataaataagtggacttagcaagattgatagataaacatatccagggcaatatagaaaaataaattgtatttccaaatactagcaacaaatcatgacaaaataaaaaaatttttaaggtaatatttatattaaaattatgcaattgctataaatttaacaaaagatgaacaaagaattattgacagaaatttcaaaaaacctaagaaaacaaaaggattgcatccactgaccaagaataccactttgtatttctgcgagtagaaaataaacttcaactgtgctaagccaatgaaatctagggatttatttgttatatgtggtgttagactccatacatatattaaaatcacaaatgttgtggctaaaaatgcaatccaatatgacattattttctcagagatcaattatttgtttagcccctcaaatgaggctgttattagatttcattttaaagagttttaattaaaaatcagtctttttcttcagctttcactctactcatttcaacaaactgagaggctttcctatttgttaggcttcaaggataagttgagccaaactggtcccaaccccattctcatgaccaagggaagaaaccctgggaggaacaccactttcatcatctttctttcctaaatctcttacacagttttattaaagggcagagtatcagagacaaatttgcctcccttgcctactggtcctttagagtatctgctctaatccttagcttctgggcagatgatcatgtgatcctcccccaccccacagccaggtggtgtgtaaccaaaagccagtgatttatgggttcaccaaacaaaaaaggttctttcttctgggactggaaggttattcatatccattttaagccacattcataccaataagaaagcaaggaaaccagtctacaaagagaagccagagagtagtgctcctgtctagaaaaaagcaggagcatgtaagcatttggagagaaagaacaagagagaccacctcacagttttctacctccttttgaggcttagctatacttcctgaacatgaatcccatcagacttccctgtaagcttccaataagcccctttccccttgagctaatttgagttggctttggtcgtttgtaacaaaatagaccctgattaaggcagagagtgttatgacagtatttagccaggagtctaaagaagagatgaatcctgtcttctctcagttatccttctgtcaaagtacaattttcaaaatattaaaaatctaattttcatgtggatagataagtgagcacatgtcaaagttttattcaactcattaatgagagaagcaggatgacaaagccagtgcgaaagaagagatgagaaaataggacttctgcagtcagagggaagaaaaggattccaaagtaaaattgcaaagtcagacacaaaattagttagtgtccaagagagcagtaaagccataatatttgcaattgtcttctctacaggacagaaaattaaaattatcaccacctttctactattataaacaaccgagcccaaatcaatgtacaaactatgttgtattcccctggagtgtaagaaaacacttaggcaagcttctcaagatcaatgcttctcaaactgaaaatacagactcctaggccctgcccccagaaattctggttcagtaggtcttgggcagggcctgggaatttgcatttcaacaagttcccaggtgacatcattagtcagcaagccacacttgcagtaacatagccttagatgacattgcaaagtcatacagtaatccttttgctttatttccaagttttgcataattttcttaacactccactcaaggtccccaggggaaatctaagcctccagatgacaaaaagcaaaataaggctaaataacacttcactcttggctgaaaatttgagtccaaaactgaatgaagaacttagatgaacaaaatgaggtcatagggaggagtctgttcctacgttgaacaaatgcaggtccttgactattttccccaaagctcatatttgagatcttcatgttaccattgcagtgcaaggaaaaattgattcaagctacaccaccaaagaaaagaaactaaagagaaagggagacagcaaattccttccaaaatcaagaacgaagctggcctaggctgtcttcccagagggacctcagtttggtgtcaaagtagaggatagcacttctaaaggggaagagaagaggcaacaggccttctcccaagggagcagtctgagattattgtggctccaagggataaagtcaccggataaattataggagacacaactaaatttgaatttcacataaacaataaataatttgttagtgtaagtatgtctcaaatattgcacaggatatacttacgctaaaaaaaattactcactgtttatctgatattcaaatgtaactgggcatcctgtatgtttctttgctaaatctgtcagccctagcaagagaatatctcaacagggccacatcacgtgcaatggccttgtagcacaggatacaaactcgaatgcctatgggtgccaggaggatggtataattcaatcaattacattgcagcaaatctgggcctgcatgctgctcaacaggtgcagccaccatacagttccagcccatttcctggaaaagggttgtaggctcggtgttactgggtctgatatttcaagatatgccaaaaatttagctttatgtaaaatcttccaatgtttggctgttgggacgtaattccattttttaaaacattgagcagaaataagaatctcaaccccctatagatttcactcagttagttttttctcaaatctcaccaaagcaggtcaaaacttctcttcctgggtatatatcctggtcttgagacattgccaaggagacagaaagagaaaaagaggaggccaatttgtccaaacttcccaagaggagaaaataaccttaaacttctcccagatactaaccccccagtttttctttcttgctttggttagtctttttttaaaaaggttattggacacttggtggttagcccacccagctgtgctgctggccttcattggtagccactcctgacacgagggtttcagtcacatctttcttacactccctatttacacaacagggttattgagataaggaaattacttacatctatttgtgtgcctagtacagtgctttgcacagagtggaagataattgatagtgatgaattcttttagcttttgtatatctgaaaacatctttatttcaccatcattatctaaaaaataattttcattggtatagaattccaggtggacaggctgggttttttcagtactatattttaaaaatgttacccaactctctacttacatgcattgcttgtgacaattaatttgttgtcattcttatttttgtacaaaatatgtcattttctctgtctgcttttataattttctttttatcactggttttcagaagtttgataataatgtcctttggtgtcgtttatgcttcttgtacttgaggtttgttgagattcttggatccttgggtttatagttttcaataaatttgggaatttttaagttattatttcttaaataatctttctgttcccctgtgcctccatcaggaactgcaattatgcacacattcagccacctaaagttgtcccacagctcagatgcaatattcttttttttaaattcttttctctttgtgtgttccattttgggtattctctattgctatggcttcaagttcactaatcttttcttctgtgttttctaatcaggtattaatatcattcaggtattaatatcatcttggattctgttttcatctgatatggagaagcattggatctgagtgggacacatcctctctaatgcaccctgccttttccgctgctccaaatttcacacaagcgtcagaaaaattcaagacaatctagaaaatctaagtacaaatacaaaaaggaaagtgttttctttcaaagctgtgaattatataaagtgagtaagctcaataaacatttgcagaagtgggaacatgtgttagttcattcttgcattgctataaagaaatacctgagactaggtaatttataaggaagagaagtttcttttagttcatgggttctgcagtctgtacaagaagcatgatgtcagtatctgcttctggggaggcctcaggaagcttacaatcatagtggaaggtaaagggggaacagatggtgtcacatggcaagagtaggagcaagagagggaggaggaggatccaggctccttttatttatttattgtatacataacgtgtgtgtgtgtgtgtgtgtgtgtgtgtgtgtgtgtgtgtgtgtgtgtatatttttttttttttttttttgagatggagtttcacttgttgcccaggctggagtgcaatggcacgatcttggctcactgcaaacttcgcctcctggtttcaagcgaatctcctgccccagcctcccaagtagctgggattacaggcgcccaccaacacgccaggctaatttttgtatttttagtagagacagggtttcgccaagttggcgaggctggtctcaaactgctgacctcaggtgatccacctgccttggcctcccaaagtgctgggattacagccgtgagccactgcacctggcccaggctccttttaaaccaccagctctcacatgaactcagagtgagaactcactcatcaccaagggaatggcactaagccattcatgaaagatctgcccccatgatccaatcacctcctaccaggccccatctccaaaactggggatcacatttcaacatgagatttggaggggacaaaactaaatcagagtgggatgggcagaagggaccaacattccacctcttgtttggagggctcctgtttcattccttctaggagggtggaaaaccttcaaaatgagatctgctgttccgctttcactctgtgcttcctttgtgagaggacagggaaggaactggagtggggagctgggacagaatgaaagggaaaaccctttctaatccatcttcttgctctcaagctgcagggtcaggtagacctaggattgaatcccaactgtgccccataccagttatttcaccttggcaagttattacctctctaagccccagatcttcatcttcaaaataggaataatattgctggcctcatggtactgttgagaaataaattaggtcatgttgaacaatgcaagtaacgcaattagcacagtggttgacatggagaaattaacattccatacatgtttgttgtatggtcatcaccctcatttttgttactgtcatcaccaggaccatgtgattaaagatgaaaatctaaatgaaccgccagcacagatctaattttggaggttggaattacaggtcatttttattttctaactctatttaatatgaagatttatttgcttttctaaacagaaaacaaaagataagttatttttaaaagttgaccagtgtccttttgggattccctttatcgtacactggtgaaagctatctttgtatttcttacctctctctgctcaaagaaggaacagttatgtaggctgcaagcacccacagcagccctataaaggtagccatgcttcctacgaatctgagagctgcagagaatgaaacacccctctcctgccctgatgcattccagatttggccacaggctctctagacaccagaaagaaacagaggctccagactggcttggttactatgaaatgaagtgcaagaatacttgactccaactggggccagcagtagcgtaaggtgagtgagatgcctagggtgcagaatggaaggaggcgccgacagtgcactcaggtgaccctgagagtattgcttccttccgttttgcaccgtaagtacctcactcactttaccttagtactggccctaatcccaaccatgaccatgtccagaataatagccaggatcccaaccagcctcctaccccacctccccagcccttggaagagaaagagggtttatcagacagttctttatggcaggtgtactgcctagacacccagtggaaaatttacatccagaaatctggggttgtatactctggagggagcaaggcagccttaggctccaacctagttgagatagcgttgtcatgtcctgtccaccttctggggtcatggtgccctctggtgcagtcagcctgtcccccagactgtacagtatgtgccttctctctatccacaaggttctgcaggagaaccaaaccaaacagctctcttagccagaagctgagctcatcagcaattaacttccttcacaagcagctgctaggcccccatctgtgttggccttctctttccatttgtctataggaatcctcccctctctcaactgcaccaaggtctgtgatactatttcctccagagcatcacagaacaactcccaccccagttgccgcccccttctacctgccagaacagcagcctcctgtcaagacccctcaggttttctggcttttttgggttgcatagatcagcataatccttagtgttgaaagcagtagataattaatttctgctaatgattttctgccttgtctcctagactcctttcagtaactccaacgacaatttcagcattaaatgattcagcacttcccttgcttccaaaggaattcactgcctggtttatctatttggcccactgaaacctccctttgcccttagctacagtttccctctcttctctgacaggtagtgtttctgagtctcccggcctccagcactgcccatgttgctgctccacttgcccctccaccctggagtcaaaaaacactgataataatacaaagaaagtctgattcttctgtctttggcatgccttgcaaatccctgtcaataactagaaatttaacaggtgttacttttagtgaaggtattgttgaccaactctgcttcccccagctgggttccttgaatggcccttgataagtgtgtgcaagaccatgttgttcctcttggggacttcttttccttactcagtcatgaatgatgaaacagaccagatgtggccccgagctgctcaggttgtaggaaacagtgggaaagattcccccactatttccactttcactagggctcgcactacagaatgcagacctttgcctgagctcactctggcgtttcatcttgctagccgtgaaaacaacccaacacagtcctgcctcctttcctttagcaattgtcatgtgttgggcatcagaattattgtctgaaaagttattttctttctcttacactcagatgcccagaaacatgtatctgggctaactaaaagacagaaaatctttattcataaaatttatatgggagaattaacacatgataccatcacacattcttctgactctttagccagtctaagttctttcttccacttaaatttgtccttaaagcaaaggaaggcctgatgagtcatgtagaatctgtgagtatattcaaagcttccaataattactttctacccatcacatgagaggtgactggtgacacagatgtttaaacatggcctaagttagtatctgaccagaggctatcaaggttattgtgagatgatcatcttattgataatttaaaattggcagtgtatttggttccattaactccaaatcaagacaggcagtttcaaaattgctttccctggtaaaaaaaagctctgtctccagaaaaaaaaaagaaaaaatggaagaggatgtttgtgggtgaagaaatgtcccctgggcaggaaagtagaaacagaccatgcttatatgacactgaataatagttagaataaatggttcagagcaatgactaaatagtcagagctgcctgaagcagctgaacgaagtaggattttcaccagtaactgtttgattacaacccattaaaaagctgacttggtgccgggtgtggtggctcacatctgtaatcccagcactttgggaggctgaggcgggcggatcactggaggtcaggagttcaagaccagcctggacaacgtggtgaaaccctgtctctactaaaaacacaaaaaaaattagccgagtgtcggggtgggtgcctgtaatcccagctacttgggaggctgaggcaggagaatagcttgaacttgggaggtagaggttgcagtgagctgagatagcgccactgcattccagcctggatgacaaagtgagactctgtctcaaaaaaaaaacaaacctgacttgctttgcctccttgttccctcgtcttctaagttctgcttttttggcccactctggatggtgcaacactcattgttcaaccagtttatcccaaaaacatttattgagcacctattccattcatagcactgtgctgggcccaggagaaatacgaagatgaaaaagttattctgtactgtcaatgacattagagtaaccacagacatatacaagtaaataaaaaattaaaagtcagaaaagaaggttatcattgttatgaaagagatataagaaagaacaaagaaggcaatttgctctgagtagataatgtttattttgatttcagtcatgttaaaattagttgtctaatggggcattatgattttccaagaagaagataaaggatgccttgtttcccaaactcatgttcatggcacagggtgccttcatttatggcaaactggtgactctcttactgaactcaatctggaaaacgctggagaaaggcatctattgtgcagaggaagatgtgtttggtaagggaggttggggtgtgatggaaagaggccttgaaatttcctgctcagaggaaactggctcagccttctttgctgcatttgtgtttctctgaggccagaatggttgtccagtcagtttcacatgctggtgtgtttcattcaaggcggaacttgttcctcgggatgaatctagcatagtgagggaccctctccagagcctttgcttcctcaagtcactcagtgtgtttacccccggtcaatgggcacaaaacaaatgttcagagctaaaattaaatgaaccaacaacacattgtaaaggcaaaaccagagtgcccctatttacacatctgtaaaatggtgtttaccatttgcaaacccaaaacatgctaattacaaagatgaataaaaagaaacacaaagcattgtgtacccattgaaaagagaacatgcttcagaaaataaaaagtaaagtttgtcagaatattgttttttctatgaaatgagttaatggattttgtgtacaatcctaacacattttgtaaatcagaatttataaaattcaaaacctgcctgatgagtaataggccacttgagaagaatcaccatcttgggaccagattccaccaacattcctaatggctaatagttattttgtgtttgcaatttatgaagtacttttgtgtctgtgatctcaattaatgttcacagcaatcctgttaagaagttaggacaactcttgcacccatttcacacatgagaaaactgaggcttgggtaatatctgcccaagagagtgtaatgagcatcagacttggccctgacactctcaccccagagtggtccttccactcccctgtgttctctcctgggacacgtggcagctgctttaagtaccagacttcccaaagggacaaggagtttcctcaccctcttattaattcaaatatgtattcattcatttaacagccctcactgagtgttgctaggcacaggagatatcatggtggcagaatgtaggtacccccatccttctccagttcttagttagctgaacaagacacacaatgaaacaagcagtaataatggagtgtggttatactatgacagggcagccacagtagtcactggcctaaactgaatgtacccattgtctatagcattcaactgtccctgggctttgcagccttttgcataatagtaataactatcatgtcaaggctcaaactcagaaggatccactttcaggctcactcacgtgggagctggcaggattcatttccttggggctgttggactgggagctcagttccatactacttagctggaggccatcctcagtcccttgtcacatgggcctctccttagggcagctcatcacatcagagtcacagagacagaatgcaaacaaggtagtcttttacaagctgatctccaaaatgacagaccatcacttctgccatagtctactaattggaatcactaggcccagcccacataaacacagaaggagagggtcatgcagggagcaaacatcaggagatgggatcactggaagccatcctgctactcttgccaacagctaatttgtagtatattcaaaacccaaatccaagtctgtctgacttacagtagctgtgccacgtccaccaaatgacagtctcacaggtctccaatatgtgcagagttcattatattacatttccaaggcactattacatgtgtgatttgtttcattcaaggtacacacgggtagatatcttaattctcattttataaaggaaaaaactgaaaatcacagagtgtaaatgactcatggacttctgtaggtcatggtaatttttagtgttgaagttaaatgactttttagtgatggaacctaaatgatacgcccaagctcacaccagatggagcctgggtgcaggttttctgcctccaaattccaagaagttcaatgctgtaactgtatcttccattgatttccacctattttccacaaagccctcccatgcagctcctaactcccacctgtctgtagatagcagcgtcagatcctaaagccacctaaagcccatcagagggcacctcaggctcccacgactttccaatgtgactgcacctccaaagccaccatgacgggaagattgggaatgaagcgagaagaggaggtctgagaactttgggatcgtcccctgcgtgttgaagacagatctcacttcccttcttggggatcacaaggtaacttttacagagttagaagtggaaaaatggctcatccagtactcaaagagcatccatcttactttcgttcttttgcaggtagctctggcaactcttcttcttctcttgccagtcataaccaatcactgagaactcccaaatccccttcacacccaccctctgctgcctgctcatgcagcagcctccttactgagttgttttcctgcctctagtctccaccctgaaatccattctccatggcacccagagtgagcttcccaaactttgatctgatcttagaactctcctacttaaaaccttccatggttccgcattgcttccagcataaggctgatattccttatcatagtgccaaggccctgcccatctggccctctcctttctctgccagccttagctctcatcattctcccatcatcacttctgctccagacacactgacctggcatggccagtgtctcccatgcgccctcctcttcctcattttctggctgtccctgctgtctcccaacccctttattcttaacctgatcaagacctccaactcattcctcatctagatttggtatccttcctttgtcatcccatagaatgtcttgctgtgcctgtcacactgtgttgttattgtatggtcagcaccagaaggagcgagcctgagtttgccttgtcagtgatatccactgtggccagcatagtatcagggccatgggaataacttagcaaacttgttgaacgaatgagtgaatgaaagcaatctccattcccatgttcctgggattaaaggcttccatgtgcttactcacccacccacgggtcaccgagcttcctttagtcctgatgactccagggggattgtccagtcattggtggggccccccactgcttgaggcaacctattcatacatttgttttgtcagcaaacatttgtgccaggcatgtgctgggtgctggaatagagttgacgatgagtaaggaacataagagtccagtccaaaatgagttctcagtctggtgcctggagcttacgcaatttcagagttccttggggaaataataggttcatctttaaaagtacctaataaagacactatcttggtattactatcctctttcaaatatgtctgatttttactcactgtagcattatcagcttattctactcatattcagcctattctgtccactgttatatttttgtttcactttttaagttttgggggtatggggccagtggctagcaatgtggcagggctcagacctcctctgcattgatgacagcccacacaccagctgcagctttattgtttggaattgtttttgagatggtaattattttaggagttactggtgaaaagcaatatgggtcagcaatatagtcagcaatatactttaacattttatgaccctttcttcattcctttctagttaaaaaataaaaaataaaaatccttcttaaggcttagggggttgtaagcttctataggatttgaagccatcatcgttagagtttgcatagttcatactccagactgctccagtctatgagaggagaggaatgctccagcaggatggacctgagtttttctcctccaatataaataattatattattaaatgtacctacaaataaataggtacatttatttattcatgtatttatttattctctcattagttctagtatttataatagtcataattatgtagcattgactcagtacttactgtacgctagccaccacattaaatggtttccatttattacccaccacagccttaaaaaaaaccttagtactcttgctatccccatttcatagataacaatgaggatgctgagatttgacaaggtcaggtaagtcaccctggattaagagtcacacaaggattaagtggcaggacaggaatttgacctcaggccagcctaacatgggaattcacatttttaaccactgcactcttctcaattcccttaattccagaaatatttgaggtgggttacaaaaacacattcagtacacaagaaggcaaatcagtgaagtaaacagataaagaggaaaattcaggcagaaacaagtaagatgaagttagacttaatatactacatatatacccacagagtcctgtgcactttgtagaagaacgcagcaaatttgattctatatttctcaaagagagaaatgtattcatttacatgttttaccatattcataaaatcaaaaacaaactaggtgctcaggggaaaaaactctccatcttgatactgagacttacagaaaacttctcacttgagcctcttaaaaaattactgtgtaacataataatagactgttgaactttacagcatccctacagcaaagtcagcaaccattctgtgagactgtttcacagatccatttataacacatctcagtgtagtgaaacatcaaagcctaggttaaaagggcaaacctcagattttacagctttccaatggcttggctgaatcccaggaagcagagctccaaaaacacattttcttacaccaagcctggagatttactccctgacaccagtctggggtgcaggaattccacagcaccagtcagatgcaggcctgtgtccttccgtaaagtgtacaggtgttgacatcttcctgtgaagagcaaggaacgcatacaggatgagcatctgatgtctgtgcctcacccccacctttatgcagagccagacactggcggggctcagatcccctcagaagaggattctggtggcatcaggtaatgtgggtgatgcattctcaaaaccttactccatagagcatggctatgatcatttcaacctggaaaagtgtttagtcagctgttactaaactctaggcatagtcatgtaaaagtcaatcaatcaatacatggattaaagtgtattttgactatataacactaagcagtatcacatcctgtgggagcctccaaggtaaaccagtaacaaaatacatggacttgtagagggttgttaggacaagttagacgttggaagatgttgttgatatggccaatgggactcaacctcagcatctggaacaattgtttcttcccacctcctttaaaggcaactgtcagagtccagacatggcatcctagagccacagaaccaatctgtccacctaaacagtacatcatcatccctgggcgcaaccaggagtctgcctacatgtattagtctgttttcacactgctataaagatgctacccgagactgggtaatttgtaaacaaaggaaagaggtttaattgactcacagttccgcgtggctggggagtggctcaggaaacttacaattatggcagaaggggaagcaagcatgtcttacatggcggcaggagagagcacatgtgaaggaggaactgtcaaacactcacaaaaacatcagatctcatgagaattccctcactatcacgagaatagcatgggggaaacgaccccatgattcaattacctcccactaggtccctccctcgacacatggggattatggggaatacaattcaaaatgagatttgtgtggggacacagggctgaaccatatgactacactctaagtgggagtgtgaggcaggctgtgctgctgtgccttaaagaactgtgtggtcactgaactttggatcctacactccatcagtaaccattttacacatacatatatatagtagattataagtatcagttactgtacagtattttataagcaatacaaaacatccattaaaataaagattgggaggaatgaaatataaaatgaatatagagagaagttctctggaagttctattttcttcccacatttcttcgtatcatcctgcacactcctctttggagaacactgtcttaatgtaagaagctgggccttctctaaaccacctcttggcacttccagcaagcttttcatcatccaaccccaacccatctccccagctgtccctgctggtgctctccacccatactccactatccaccatgacagcatacacaccatttcctgcatgcacaatgtactctgcatttttttgttcatgtcattccttcatcccaaatgcctctccctctttctccagctatcaaaattttcagcttgcaagacccagttcaaattctatctctaccctgtaattaacctagatcccttctcaaatagaatgaatcactttcttccataatattaactaaaattatattttctaatcttcccaatatccctgcaaagtattattgagtatttgacagatcagaaaaggctcttttctagtcagaaagactatagaaggctctttttctagtcagaaagactataaatggctcttttctagtcagaaagactatactctcaggaatcatttctatagttttttactagagaaatttctctgaacgtgtagagcactggaaaccgtgaggagaagctgccttctcttctgagcatgaagtgagctctcagtgttgcttctctgcaactgccatttgccattgatgatcgttcttctcttcctctgggagagtaaaagggtacaggatgcagtctgagtaattactgctttaaaaaagaaaaagaaaagtctcttggatattgtgtaattaacccatacccctagtgactgacaggagcagaatttgaactcataacaccccggtggctatgttctttccagtgcactaaggtttccttcatgccttggcttcccatgacagaaactgcactctatatatattctcttatgacatcttcaagtagccctgtgaatacatattatcatctctagattggagctgaaaaaacaaagccttggaaaggtgaggtagcttgcctaacgtcacttagttagcaaacagcagggatggttccaacccaggttagtctgactgtagatcccatattctttctgttttgccatgcaagtgggtctattcttctcattacttgttactttcacctcactttagcttttagtcattttgccttggcttaaatagcaactttaatacctctttccttcaatgctctgtgaggtaactgaggacaagaaaatatgtttcactcaagtctctggtggccagaaactacatatcaaaagtatgtttataaatgtgaagttgaaccctataggaagaatgattgcaaagaaatctcaattcactgtgctgtctctgtctctagagtttttgtacctattggcttgccaacactgcattcaaagaatatggaaaggaaactgaaaacggtggaagagaccaccacctcttgctatctcctaaaagatcatttttaataaactgcagcctacccttgaaaactgtctatcataagcagagtgctggcaacatctcctgaaagatgatagaggtccaggtggccatccagatgctggaacatgcctgaggacgtggggggatgtttaaaataattgataattttgaaaacagaaaacagtttattatacaaggatataaagaataaaatattttgtatagctgtacagtgtgtttgtattttgagctaagtattattacaaaagggtcaaaaagttaagaaaatttagaagttcataaagttaaaaagttatagcaacctaaggttaatttattattgaagaaagaaaaatatttttataaagttagtgtagctcaagggcacagtgtttataaagtatacagtaatgtagagtaatgtcctgggccttctgagaatgtatcccatcactaagtgacatgattgtagtaaactccttgcagatgttgactaagtcaaagattttgagatgagaaaattctcctgggttatctggatggggctaaatgccatcatatgtatcctggtaagggagaggcagagggatatctgacacagaagagaaggcaatgtaaccacagggaccaagactggaggaatgtggccacaagccaaggaaagctgggagccaccaggagctggaagaggcaaggaacctacgctcttctagggcctttggagggagtgtggccctgctgactctggtttcagcccagtgatactgatttcagatttctgatttgtggtaatttgttagagcagccatcaggaattaatatactagtaagagctttagtgcaaggggatagaagcgaatgacacacatgacaagtaataacttaggtacagtactcagcacctctccagtcttaagcatgctcaaaaccttggctaccgcattccagggaaaccaggctatcccccaccaccaaaaacccatgcttctttggacattctatcagttcagatggaggatgattatttctaagatgaccactccaccatccaccaaagtcctgcaaaaaataactctctgtggctttccagttagttaaacccaccacgatcatgggcttctctttattattaaatataagttctaatggatgctatcctcaccttcattctcatccctgtacctccttggattttatctccttaggcctgaactcccactggtcccaaaccttccaccaggccatttgggaatgctacccaatttaaagcaccttgctatatcctcaatattttccccatgcctttactgctctcactccatctgggttttgcctatcacattgagaaccccaagccattcatcccgtctactgatcagtcctttctctcttcacttccttgcccacacggtccagatcctacagctcattagttcagccgctcctttgccaatatcttcaaatcccttactccatctgtcctcctgttgcacctgcctggcaaaatcccacacccaaaccaatgcaaacatctggccttcctcatctctacctgggcttctggcattcctcatctctacctaagcttctgagcagtggcgaagaaaatcaaaatatccatcaaaactctagctaatcatggtctctggcctcacctggatccttaagacagtgttcgcatttttctagttagctttctcgacagtggctgtatcaaaccttctccactcttaccaaagcccctatgacttctttaccctctcagccttgtgcatttatttatccattcattgtttctttcaacaaatactggctgggtgtcaaccatgtgtcagatgctgcactaagcataaggacaacacagtgaaaagacagatatggccgctgctctaacaggacttaacaagctaccggaaaacactctctcagaagaccacctttctgagagaggagacacagaagctatctgaggattatttccaccttcctgtgtccagactcacatcgttgcaccttccttctatcctccttttttgtacaaagagaatcatgtttctcctgtcaacaaccagtcccttggccgatgctccaaggtcccttgcgtccccactccttgaactccttgttctctaagttatccctctatcttgaattgccgccctttctttctctttctaatgtcttttcaccaccagtgtttaaaaggtcttaggtcttttccatctaaaaaaatatataattactctcccaagctgctgtcttatttttctcctattcacaggcaaactcgtttaaagagttgtctgcgcccctagtctctgcttcttgcttcccagtcccccacacacccactataatttggcatatgctccactcccaggccccgtctttcttgacgtctgtataggatttgacaccgttgattactcccccctttttgaaacactactcctttagtttccataacactacactcttctggtttgtcttctgtctctctgtgataagcagaattctaaatatgtcctctcaaaattcccatctcccaattattcaattaaacactaatctagtttttgctgtgaggagactttacagatggagttctggttactaatcagctgacctttaaatagggagagtgacctggattattcaagtgggaccaatgtaaccacatctgccctgaaaagcagaagaggaaggcagaagagtcagtcagagagatgtggcaatagagagtcaaaatgtgaaaaggactgtgctgtcactgccggctttgaagggagccatgagccagggagtgtgagtagcctctagaagctgaggacatcttccattcagcaaggaattttaccaataacctgagagagcctggaaatggatgctccccgctggggcttccagccaggactgcagctctgctaactctttgatttcagcctggtgaaactctaagctaagaacaaactaaaaaccagctgagtcatgctgtgcccagactcctgacctacagaactgagataataaatggatattatttttaaatgatgaatttgtgttcatttgttatggccactatcaaaactaatacattttctatctgctccctctctgcctctttggggacctgtcttcctctatctgtcccttaaacatcattttctgttctactcattctcgtgagtagtattattagctctatgcttccatttctatctatatgctactaaatccataagccataactctttgtcagatatctttgctgagttccaaaccaataaatccagctgtctgatagatatttccatccatatgactcagacgcacctaaaactcaacatatccaaacttgaactcgttatctacccctatagctgctcttactcctgagacctctatggcataatagttatccagctgccaaagtctaaaccggagcctcatcctggcttcttcctcttctttgatgctaaatcaaatccccacatgctatctattccaactccaatttcctctaatccttctacttccctcagtttttgcagcacaagtcaccatcatctctcatccatgctactgcaaaagctccttactggtctccttctctccagtggtacatcctccagttcattctcccagctgcagtcaaaatatcactcctgagataaaaatcactctccttgagggaaatagaagagtaatatgtctaaagaccaagttaccattctgaagaatgaagtcaagaaaatcatccataactagggcaaaaagataaaaaaaaaatgaaggaaaaagtaagagacgtggaggattacttcatgaggcccaatatcatctatgatttcttaaatgtgggactgggaagtaatttttaacataagaaaatattccaaagttctagaaaggaatttccaagtgccctagactattaattaaaaaaagacccatgctcaggcatatcctaataaaatttctcatcggatgcctgaacaccagggagaaatatattgaatctactaatataaaacaattttaaatctagaatcccattttcatccaaactaactgactaatagaggtcaaaaagaaagtattttcaaatatacataaagaccacctctctaaatgaattgtctatgatgtaaactgtgccagtattttaattaacctcatacaattctagaaagttgtcacctctgacagatatgattaaagcaaaacaaaaaatgtcattctaccatgacttgtaagtaaagaaaccaggatcacttacagttaaatccaaataagttggtgcatgttttgcagctgaccagattttagaattttgctatctcagggatagattatactttgattctttgaagcacaatgggatgaatttcagaacaccaagagacaggctgatcaaaggatttcaccaccctttattcactatcatatgcaatgtttaaataatatttagacattgcccatattgatttcagctctctgcccaaacattggaaacaccaattatgtaaacagtcccagaatccagagctagggttgcttgcatagtgcttaagggtagagtatacaaagaacgccaggaacctgatgccaagccctacagggaactttcaggttataattccagcaagccgattatagacctgtggctaaatttacttaaaaccaccacccagggcgaaatccattgtgaacaccagccatggcaaaatcccattacaacttccttctgatacaaaggcacataataaaagagcaagcaatcaagagtcccaaccaaaagacctcaagtggggcctcacaaatattttttctccatttcccagatcttgcaagatagggctgtagagcccttgggcatgctgctgaaaaacactggttaccattagcaaccactgtttattccaggattttgttttattattggctataaggatagttacaccaaaacctttctatgctacatcagtgacacagtggaagctattttaatattataaactcatgtgatatttcagtttaactctaattttatcttttcttttctgattttatgtaatcatttactgattcatttttttccaagaggccagcttttctcctgttttctgtataactgttcctaacaattttaatacactcctactatatgttgtcaccaggtgtttaaattacagtattcttcaaaactttaaaaatcttaatttttccacaaaaaaaaattaacaaattcactaaggcagaaataaaacacattaaaaactcacaactagagaagggtacctctgaggtaggctgaataatggacccataagttgtccacatcctagtcaccacaacctgtgaagatgtcactttatatggctagaagaactttgcagatgtaattaagttaatgatcttgtgatggggagaatacgctgcattatctaggtaggatgaacgatgaaatcacaagtattcttataagaggaaagcagaagaaaatactactatggaagaaagggcaacgtggtgacagaagcagagattggaacggcatgctttgaaggtgaagaaagggtccacaagccaaggaatcgggcagccacaagaaggggaaaaaggcaaagaaatagtctcctctcagagccttcaaaataaactagacttgccaatactttgactttagcccagtgagaactgattccatacttatgacctttggaactataggagaaaaaaactgtattgttttacatcactgaatttgtggtaatttattacagtttcagtaggaaactaatataaccacccacaaaaaaaacctaatttatttgggaattcaaaaacacttttcaaaaaaactagttaattaaaagagtaattacaaactatttagaaaggaaagggtgtgtactacatattggaggttaagggatttggctactgcagtaagaaaaaaaaaaaagtagagagaggattctgggaagacagcagagtaggaagcaccagtaatatgtccccctatctagacaaaaattgcactggcaggatctgtctgatttaactattttcaaacactggagtccattaagttttgcaacttccaggggaagttttgaatagtaaactgcattaattttgatcaatttcagctcttagcccagcagcagctacccgtccctcacccctcagccccatggcaggtggttgtgcatgcgttcctagagcaatctgcacacagcttgcaggagccaaagtgagcaaaaaacattctgtcctccagatatcagagatctgtgctctgtgctttgattgctaatttctacttctgaccaaagaggtgcaaaaaagtgttggcaagcttttcctcttctgcctgaaaagatgtccaagggatttatttatttatttggagatggagtctcattctgtcacccaggctggagtgcagtggcatgatctcagctcactgcaacctctgcctcctgggttcaagcgattctcctgcctcagcctcccaaataactgggattgcaggcacaacaggtgccaccacgcccagctaatttttttttttttttgtatttttagtagagatgggatttcactaatgttggccagtctggtctcaaactcctgaccttgtgatcaccctgcctcggcctcccaaagtgctaggattagggcatgagccactgcacctgaccccaagggatttaaagtgaactttccacccttttttttttttcccttttgggagccagatattagacactagaatatttaaaaataactgcatatgcagggagaattagaaagtgaccaaacatgcccagagaaaggcacaggctcagaaaaggcttgagaagatgttgagtttacacttcaggctgatccttggcacagagacaacccacaacaatcaaatccaaaacaattaaaaataacaaaaaccagcaaaccctcggagaaggggagaattttatttccaaagttaccacattattagatttaagtgtctaatttttaacaaaaattcacaaaacccaaaggaagagcaaagaaaggcccattcaaaggaataaaaaaaataaatcaacagaactgcccctgaacaagatctgatggcagctcttctcatcaaagactttaaaaccactcttttaaagatgtccaaagaactaaaggaaaatgtgaagaaagtcaagaaaatgatgtatgaacaaaatggaaatatcaataaagagaaaaacctaaagtgaaaccaaaaagaaatgctggtgctgaaaaatacaataactgaaatgaagaatttactagagggatttcaagtcagatttgaataggcaggagaaagaatccacaaaaacttgaagataggacaatagacattattgagtctgaggagccgaaagaaaaaagattaaaagaaagtgaacagaatataagagacctctgggataccatcaagtggaccaacatatgcactgtgggagtctcagcagaagagaaagacataaggacacagagaatgtttgaatagataatggttgaaaactttgaaaatttgataaaagacatgaacataaacatccaagaagctcaatagactccaagtaaaatgaactcagagaccaacaccaaggcatgatccaactttcaaaagacaaaaagagagcagcaggagagctcctgagagcagcacctagtcacatacaagaaatcctcagtaagattatcagccaatttctcattagaaattttggaggatgaaaggtaatgggctaatatattcaaagtgctaaaagtaaaaaaaaaaaaaaaaaaaagaaaaagaaaaaagaaaagccaaccaaaaattctatatcaggcacaaatgttcttcaaaaacaagggagaaattaacacattcccagataaacagaagttatgggactttattaccactatgacttccctaaaagaaaatcatgagggagtcctgcaaggtgaaataaaaggacagtagacagtaacttgaagccatatgaaaaaatgaagatcttaataaaggtaaaaaaaaatggacaattataaaagctagtattttgtaataacagtttttattttctacagaagtgtaactacaccttttgttttctacctgatttatgactaatacattttctaaaagattagtcttaaagccagtataatcataactttgatttgtaacttcacattttgctttctccataatttaagagactaatagtttatttcttgggggcacacaatgtataaagatataattttgtgacatcaacaaatgaaaggactgtaaagtaaaggagcaaagtcttcgtatgttattgaagttaagctggtataagttcaaattacagtgttataacttttttttttctttgagatagagtctcactctgttacccaggctggagtgcaatgacacgatctcagctcactacagcctctacctcccagttcaaacaattcttgtgccttagcctcccaagtagttgggaccaccagcatgtgccaccgcacctggataatttttgtttttttagtagagatggtgttttgccatgttggccaggctggtctcaaactcctgacctcaagtgatctgcccttgttgccctcccaaagtgctgggactacagacccagccaagagtgttataactttataatgttaaaagtaatacccgtgttaaccacaaaatagttacagaatatacacaaaaagaaatgagagaaaaatttaaatattttaactacaaaaaactgactaaacacaaaagacaacaaggaagaatataagggattaaaaagctataagacatatagaaaacaaacagtaaaatgacaaaggtgtctccttatcaataattacgttaaatgtaagtgggactgagcgcgttgcctcaagcctgtaatcctacgattttgggatgccaaggtgggcagatcacttgaggtcaggggttcaagaccagcctggccaatgtgatgaaacctcgtctctactaaaaatacaaaaaaaattagccaggagtggtggtgcatgcctgtaatcccagctacttgggaggctgaggcaggggaattgcttgaacccagggggcagaggtttcagtgagctgagattgtgccactgcactcctgcctgggtgacagaatgagtgagactttaactccatttcaagaaaaaaaaaaagtaaatggattacattttccaatcaaaggacagagattgcagaatagataaaaacatatggcccagctatatgccatctacgaaagactcacattaaatctaaagacacaggttgaaagtaaaacgatggaaaaagatattcaatgcacatagtaaccaaaagagagcatgggtggctatactaatatcagacataatatatttaagccaaaaaagtttataagagataaagaaaaacattatatattaataaaagaatatattatatataataattataaacaataatatgtaataattttaaacatttacacatacaacacaccatcaaaatacacaaagcaaaaactaatggaaattaagggagaaatcaatagttgtttaaaaatagttgaaatctcaatactcccctctcaatggatagaacaaccagacagaagattagtaagtaaatagaggacttacacaacacagtaaaccaactacatctaacaagcatgtacggaacactttacccaagaacaacaggacaacaggatacatattctcctcaagtgcacataggactttttaaggataaactatacgttaggccacaaattaagtctcaataaattttaaaaggtagagatcatacaaagtttctttttttaccacaatggatggagttagaaatcaataacaattaaaactggaaaatttgcaaaattgtgcaaattaaacatcacactcttaaacaactaatgaatcaaagaagaagtcatgtaggaaattagaaaatatttagagatgaaagaaaacaaaaatataacacaccaaaacttataggatatggggaaagcaagccgtgctcagggaaaactcaaacaaatcagcaagaaaaaaaaaatcctattaaaaagtcggctaagcccagggccagccccatcatcatggtattggtagcctcaccccatccatgtcatccacgtcacatcaggatgtgcaatcttccttgtcctctgttagtggaatttgcctgggaaaacctccactgaatactgaaattgttgcatgcccatggatttcttacaacaaatggggaacgtggtgtttcccacctcttgtgggtagaaacaaactgcagtctgccttgaggaggcaagaaggcaaagccagggcagagccttgctgcaggaagcattcagtgagaaagcaggtttagatgcttaggagggctgagggagaagattcgaccagcactatctttgcttcaagtcttaggatgtctgaactttctgctttatgttttcaactatctttttttttaatggcataacctacatcttgcttttaaaagaagtagcctcaaattaaacttcttaaactctgatgctctggggctaagaacaacaagtttggatctcgtgccgtgtaatctgatgtttcattctgctgcctccatcacagaacagaatcgctttccagaaaggcagttactggaaacagcagaggctcccagcagtgggagggctgctcaacaatgcctcctcccccaacaccctttttttcctctgaggggcccaagggttatggctttcatgtctaagtgtggggacagaggagggagaggcagagcctgggcccagagaggacagcctggtctgaatctggaataattaatgccacccaaagaaaaggtcctgctacgtccactgttgtcttagatctaacgatgctgctatatacaaaacactgatcatccaaa

SEQ ID NO: 19 - DNA, 212805 bp, Homo sapiens
gaattcctgggctcgggcgatccacccgtctcagcctcccaaagtgctggtattacaggcatgagccaccgcacccagcttctatacattttggatactagacccttatcagaagcataatttgtaaatattttctctcattctacaggctgtcttttcacttcttgataatttattctcttatgcacaaaaatgtttaattttgatgaagttcagtttatcttttttgttatttctgctttagtatcattctctaagaattcactgacaaatccaaagtcatgaagaataaccctatgtttttttataagagttttaaagttttagctcttacatgtagggtgttgatccagccaatcagatcttatactaaaaggctgctgtatttgataaaacataggggtctaacttcattcttttacatgtggctatccagctatcccagtaccatttgttgaagagattgttcttttcccattaaatggtcttagcaactctgttaaaaatcagttggccatagatttatgggtttatttccagactttctattctattcccttggtctacatacctatccttatgctagtactacactgatttgatcactgcagtttcatattaagttttgaaaacagaagtgtgagtcttctaacatggttcttcttttttgatatgttttggctatttggggccccctgcaattacatatgaatttgagaactgacttttcctcttctgcaaaaaatgacctgaaatttggaaatagatctttaaaatctgtgaattgatttgaggagtactgccatcttcacaatataatgtcttctaatctctgaacacaagatgtctttctattgatttaggtcttttagcaatgttttgtacttttcactgtacaagttttttaactccacggttaaatttatattttaggtatttcattcttttggatgctattataaatggcattgtttgcttaatttcctttttacatttttcattgctggtgcctagaaatacaactgagttttgtggttgatgctgtaccctgaaactttgccaaatttatttactagctctagcagatttagatggttgacagataacaaacaggaagttgctctagctcatggggggctgaaacaaaggtatctgcaccagtccctcagggaaccaccagacaggtcaaaatgaaaactacaattttttttcagaacaaggatcttattgtccccgtcctggcaccagtgagctacaccgggaatatgggttgctggccccatagctgctgctgagctagaaaataaaggatattaggtatataagcaaaaatgtcataatgctttcttatcaaaatctggcactcccctggatgctgttaagttttctatcagattccagagttatgcaaaagttgatttgtcagttttttccagtttaacatagttgcttctgtggaggtaactgattcttagagctccttgctccaccactcacttgcttttaaaaactgggccgggcgcagtggctcatgcctgtaatcccagcactttgggaggccgaggtgggtggaacacccaaagtcaggagttcaagactagcctgaccaatatgatgaaacctggtctctactaaaaatacaaaaattagccgggtatagtggcatgagtctgcagtcccagctactcaggaggctgaggcaggagaattgcttgaacccaggagatggaggttgcagtaagccaagatcatgccactgcaatccagcctgggcaacagaacgagactcggtctcaaaaacaaaataaaataaaaataaataaatagaatgtggcagaagtgacagtatttaactcctgagactacaacataaaagacagtgagaggtcctctttgttctctctcttggaccactcactctgagagcccctgaatgagccatcctggaagtgaatcctccagcccttgtcaagccttcagatgactgcagctctgatgaacacttagattgcaatctcataagaaaccctgagaatgaatcacgtaactaagaccctcctgaaatagcaatctacaaataccatgataataaatgtgtgttgttttaaggtgctatgttttgggggtacatgatatttaaagctgagactcaaaagaaaagaacctagccactccaagagttctaagaaaaagagtgtttcaagtaccgggtatagcacatgcaaaggccctgagtaaggaaagatcttaagcatgttaaaaaaaaaattaaaaatctgaaagactagtgtgacttaagctcagcgaaggaaagaaaaatagtgaagaaagagacccccaaaggggcagaaagaaaccaaaattactataacaaagtcttaaaaagtagtaaaaactgataatatatgataaagtgcctttgaaaccacaagaaacaactacaaaaatttaacatttagaaacattaactggagagaaatctgaaactaaatgtatctatcatcacacaggaatccagggtaggaaatatgaaaccccctgagagcaagaaccaagggtctttacatctcccatatcacctactcatctttgtagaattaatgcacaatgacaaacctgaaaaaaataccttttgaagacactatttaaaattctaagtaatgaattcattggtgaaagattttaagtctagaatacaggcttcaagtatctcctcactaggtagtccatgacaacggccaaataaataactcatgtagctgcatatctaaagaacatgattataaatcagctctacaaagatgcacatttctccttgtcctgggctaccatgtgataaaaggttttataattggtaaaaagagtaaaagaatttcaaaagaattcccaactggataaccagtctctgaaattaaaactgaatttaatttagcaaaataattccatttgtatacagaaactgtaagatttttaaaatgaacttttatgggagaacatactgttacgaaatacattttcaatcagtaaaacataaaataatacatgtgttttcagattttatgactatttgaataccaagggttattctcctctatatctttatccagaaaaaaatatataacttgaaacacaaaggcaaaaaataattagcaaggtatagaagcactagacactacaaaccaggtgcagtggctcacacctgtaatcccagcattatgggaagttgaggtgggtagattacttgaggtcaggagtttgagaccagcctggccaaaatggtgaaaccccatctctattaaaaatacaaaaattagccaggcatggtagtgtgcgcctgtagtcccagatactcatgaggctgaggcaggagaatcgcttgaacccgggaggtggaggttgcagtgagccaagatcgtgccactgtactcccgcccaggtaacacagtgagactctgtttcaaaaaaaaaagtattagacactacaaaatgtggtaaataaatacaattattttatttcgttatttaaatgtagtaacatcaatataaagtaaaaggaattaatagctagtttaatatgctaggcctttttatgtcccacctgcaactcctgctatggtacgttttatctacagcatagctggtgaccagttaaaagaaaattccagaagatatgacacaaaactgtataaattcaagacaatatttatttaacaaacccagagttagtatcaactagatactaggtactgtggaagttcatcctatcaacattacattccactaatcactaattcttaagacatcagaaaaagatagcaaacatataaggcaaaccaaatatattttgagattcaatgaaaaaacatatcttacttgtatagtaaaacagtaagtgcttttaatatattttaacagaattacagacaaataactcagaagaaaaaaatcaactttttgaagataattacaaaccgaattttcttcttcctcttccaattctcgttgctgttcctcatgtcttttagctttgatctccatagcttctgtgatcaggtctcttaatattgatacaggtttggcattcttgataaaaggatgctaaaaaagtaaaattcaatggtataaattcaaaagatttttccgaattatagctaacaaatgttaaaacaacatgtaaatgttaaccaggatcacaggcttcaatgattgttttttcatctagaattaaatgtataggttaagaaaagagagtatggccactgcctagaaataaagaatttgctttggggcttgtttaaaaaaaaaacttaaagcacacatgcaaaaatgcaaccctgttaataaaactataatatccttaaagatctaattgtccaaaggaagtgtacattaggagtaaaaaagattaagttaaaaataggattacagattatattacacatagaaataaacttattttggtactgagttacgtaatttaattaatcttaataagttgacagccaaaatcagtggccaaaaggagagcaactattttgttacttctttaacatattttctattttattgtatcttaagtaatttaaccaagacaaaaatattttttcagaaaatgaatgttgcctaatttctttactatatataaaataacttgtcactttttaaaaaatatcaccctgatctagctaaaatagctaagctctctatcattctgacaaagagaaggaaaactatcagaatagacctaggttttgaatttctttttattgagaaggagggacatgagagaaagtagagtgaaaggttataattttggatagataacctaaatttggggcagcaatcagtttcagtaattttcatagttacatgtcagtagatagcatcaggtaaaagtgacctgactgagtgagtgagttatttgtttatttgtttgtttgagacaggggcttgctctgttgcccagatgcgagcacaatggtgcaatcatggctcactatagtcttgacctcctgggctcaagtgatcctcccacctcagccttcctaagtgctgggaatagaggcatgagccactgcacccagccctgagttattttaataaacttcaagagaacacaaaaatatatttaaagacaaaaaaaattgtgctgaagaagaaatagatacttgaaagagggtttaaaatggcaaacatatcatttgggacaactataagaaagaactttttcagagtacagaaatactaaaatcaattgtaaagaaccaataaattattttagaacagttatagattaatcttaccaaacaaattaagtcctattaacatatctgtggtagagactcctggtcatacaccaaaaatagagttgtggttggaccgacaattgcccaactggatcctacgtttctcaacttaacccattcaggtggttatatgcgactaagtgaatgcgggagcaaatactgtgttccacttcctggcctgggctatggagggctccttgttactaatggataagggtgagaggtcaggttctcccagagtcctgtactggtactgtgggaagtagtctcattttagctgattggcgatgaaagtcctgacccttcaccagactgcctctgaccccactccaacagggaggttgttgggttcttattcctgcctggtaggagtataagtctaggctcccacatggtcttcactggcactccccacttagggagggaatactttctacactgccttgtggagatgaatgccttagcatgacagccttctctgacaccgcctgagaaggactggacagcctcaaaaggatagaagtctaggttctccatttagcctttgctggtgaccggggtaggccatagttttcttggtggtgtttggctagagtagaacggttatcatctgaaagttttcagtcttactaggctgtccatttctccgtccttctgcttgaaagagcaggtttttatttctagtttgtgtccaatgttgtttctgggttgttggcttctccactacccagtgtgggataaatgagggaaaaagaaaccccagggaactcacagctatgtctttccttgagtcccaccatctctagcagtctattgccttctttccaccttttagagtctttttatgcttgttttatatacttacaatgtccatggttttagctgtactttaatgaggaagtatagagaaaaatatggttactcaatctgtccagcggcagaaatgccttcttcaactcactttaagcacttgttttatctgaagtgtttttgtataaatcattaattttgaacactatcagtttagaaattgataattcagaacatgaacaaaatttaagaggaaatatttcagattttaaaagaataaacttttcaagcagtctcaatttttaaaatacatcatcaagaatgtgataggttgatctgcagtaatttctgtcttctcattactttaggtggtttaagaatcctcaccctctttaatttttattttagacacatttagaaataggaaaactttactgcctattagaatctggtacattcatctttttcttgttgaaatactttataaaacccttcatataatcagccccttgcctgacataaatatatatatatattttttagtttccgttttttgccattcatgcattttttaagttatatgtattcaaatcatccatttttcttttgctttattgcaccggaatgaatatataaatattctcctatattaacccctagttctttcctatttccattttttgttttagtttttttaacatttaagaccttaatctatctggaaattactttggtgtttctgtggtgaagatctaagttaatcctcccaacaccccctaaaggcaggcagttatctcagcaccatttttactttgtttttccctcactgattagaaatgctatcttcataatatgctagtttcctttgtatattatataccatttgtgggcatttaattctgcttcattattctatctcatactggcgttacatacttttctaagcatttaacaaaaagatgtaatttgtttattaaacataaaatttgatttttctattaaatcaatcactatataattcagatgatgtttattttttgcctatatggttactcagtgactgaaaacggaatatcaaaatatcccaatttatttatttagagcaacctcttatgtctttaatttgtaacatacaatgctatattaatatatcaagtttataactatatcttcctttatattatgttctttatcaatattaagtgactccatcctcatttactgatttctgctgtcaattttgcttttttgatcatgttattcatactatctttttatattttattaaaatttcattgcctgtttttaacttttttttttaaataaaaacagacaattgaaacatttttattaggttaatttcactttttacattactacaacaataacaaaaataccaataccattgaatacaattaagaagtttacttaaatcatattcctcaaaatttggtgtgtatcatcacatgtgttagaatcatgggagcgagggcagagggttacttctaaatattcaaattctcggcctcccctagacaaactgaatcagaatttctaagaatgttgccatagaatctgcattttagcatttctttccaagtgatttttatgcaaaccaaaattaaaaatactgcattgacattttccatcccagtcttctgaagattgaaagttaacagcagggttggggtgggctggggtgggacaaggtcatgggaaatagcagcccaggaagcatcagcactgtcatcctcactgtggtttggatgaagtaccttttcaataagctcttctgtatctcttgataaacagttacatggtaatgaaacttttcaaggttatttccttgagaatacagctaaggcagcttcttgcgtctttccaagcagaatattctgatattattattaatctttatcttgtcttgttctgaaaacaatttgagctatcttatgaaattcatagtctatattagtttaagaagtagatgagaaaataagctcaggaaaataaacctatgggtaagagagagagtgtatgtgtgtgtgtgtgtgtgtgtgtgtgtgtaagagagacagagagaagaaagagagagaaggtaacttagagattaataaatacttcttttaaaaataggagttatttgtattttagtttttaattcaacctaaaccttctctctgtagggtttcacaattttaaaaaagtatgtcttttaatttaacaaaatgcaaacatgtatctctgctagtggagaaggtagtgaaaatctttttttttttaaagtttttttttcttttattattatactttaagttttagggtacatgtgcacattgtgcaggttagttacatatctatacatgtgccatgctggtgcgctgcacccactaacttgtcatctagcattaggtatatctcctaatgctatccctcccccttccccccaccccacaacagtccccagagtgtgatgttccccttcctgtgtccatgtgatctcattgttcaattcccacctatgagtgagaatatacggtgtttggttttttgttcttgcgatagtttactgagaatgatgatttccaatttcatccatgttcctacaaaggacatgaactcatcattttttatggctgcatagtattccatggcatatatgtgccacattttcttaatccagtctatcatttttggacatgtgggttggttccaagtctttgctattgtgaataatgccgcaataaacatacgtgtgcatgtgtctttatagcagcatgatttatagtcctttgggtatatacccagtaatgggatggctgggtcaaatggtatttctagttctagatccctgaggaatcgccacactgacttccacaatggttgaactagttcacagtcccaccaacagtgtaaaagtgttcctatttctccacatcctctccagcacctgttgtttcctgactttttaatgattgccattctaactggtgtgagatggtatctcattgtggttttgatttgcatttctctgatggccagtgatgatgagcattttttcatgtgttttttagctgcataaatgtcttcttttgagaagtgtctgttcatgtccttcgcccactttttgatggggttgtttttttcttgtaaatttgtttgagttcattgtagattctggatattagccctttgtcagatgagtaggttgcgaaaattttctcccattctgtaggttgcctgttcactctgatggtagtttcttttgctgtgcagaagctctttagtttaattagatcccatttgtcaattttggcttttgttgccattgcttttggtgttttagacatgaaggccttgcccatgcctatgtcctgaatggtaatgcctaggttttcttctagggtttttatggttttaggtctaacgtttaagtctttaatccatcttgaattaatttttgtataaggtgtaaggaagggatccagtttcagccttctacatatgactagccaattttcccagcaccatttattaaatagggaatcctttccccattgcttgtttttctcaggtttgtcaaagatcagatagttgtagatatgcggcattatttctaagggctctgttctgttccattgatctatatctctgttttggtaccagtaccatgctgttttggttactgtagccttgtagtatagtttgaagtcaggtagtgtgatgcctccagctttgttcttttggcttaggattgacttggcgatgcgggctcttttttggttccatatgaactttaaagtagttttttccaattctgtgaagaaagtcattggtagcttgatggggatggcattgaatctgtaaattaccttgggcagtatggcctttttcacgatattgattcttcctacccatgagcatggaatgttcttccatttgtttgtatcctcttctattttcttgagcaggggtttgtagttctccttgaagaggtccttcacatcccttgtaagttggattcctaggtattttattctctttgaagcaattgtgaatgggagttcactcatgatttggctctctgtttgtctgttgttggtgtataagaatgcttgtgatttttgcacattgattttgtatcctgaaactttgctgaagttgcttatcagcttaaggagattttgggctaagacaatggggttttctagatatacaatcatgtcatcagcagacagggacaatttgacttcctctttttctaattgaatacccttgatttacttctcctgcctgattgccctggccagaacttccaacactatgttgaataggagtggtgagagagggcatccctgtcttgtgccagttttcaaagggaatgcttccagtttttgcccattcagtatgatattggctgtgggtttgtcatagatagctcttattattttgaaatatatcccatcaatacctaatttattgagagtttttagcatgaagggtggttgaattttgtcaaaggccttttctgcatctaatgagataatcatgtggtttttgtctttggctctgtttatatgctggattacatttattgatttgcatatattgaaccagccttgcatcccagggatgaagcccacttgatcatggtggataagctttttgatgtgctgctggattcggtttgccagtattttattgaggatttttgcatcaatgttcatcaaggatattggtctaaaattctcttttttggttgtgtctctgcccggctttggtatcagaatgatgctggcctcataaaatgagttagggaggattccctctttttctattgattggaatagtttcagaaggaatggtaccagttcctccttgtacctctggtagaattaggctgtgaatctgtctggtcctggactctttttggttggtaagctattgattattgccacaatttcagatcctgttattggtctattcagagattcaacttcttcctggtttagtcctgggagagtgtatgtgtcgaggaatttatccatttcttctagattttctagtttatttgcgtagaggtgtttgtagtattctcggatggtagtttgtatttctgtgggatcggtgttgatatcccctttatcattttttattgcatctatttgattcttctctctttttttctttattagtcttgctagcggtctatcaattttgttgatcctttcaaaaaaccagctcctggattcgttaattttttgaagggttttttgtgtctctgtttccttcagttctgctctgattttagttatttcttgccttctgctagcttttgaatgtgtttgctctggcttttctagttcttttaattgtgatgttagggtgtcaattttggatctttcctgctttctcttgtgggcatttagcgctataaatttccctctacacactgctttgaatgcgtcccagagattctggtatgttgtgtctttgttctcattggtttcaaagaacatctttatttctgccttcatttcgttatgtacccagtagtcattcaggagcaggttgttcagtttccatgtagttgagtggttttgagtgagattcttaatcctgagttctagtttgattgcattgtggtctgagagatagtttgttataatttctgttcttttacatttgctgaggagagatttacttcaaagtatgtggtcaattttggaataggagtggtgtggtgctgaaaaaaatgtatattctgttgatttgggatggagagttctgtagatgtctattagttccgcttggtgcagagctgagttcaattcctgggtatccttgttgactttctgtctcgttgatctgtctaatgttgacagtggggtgttaaagtctcccattattaatgtgtgggagtctaagtctctttgtaggtctctaaggacttgctttatgaatctgggtgctcctgtgttgggtgcatatatatttagtatagttagctcttcttgttgaattgatccctttaccattatgtaatggccttctttgtctcttttgatctttgttggtttaaagtctgttttatcagagactaggattgcaacccctgcctttttttgttttccatttgcttggtagattttcctccatccttgtatttttagcctatgtgtgtctctgcacgtgagatgggtttcctcaatacagcacactgatgggtcttgactctttatccaatttgccagtctgtgtgttttaattggagcatttggtccatttacatttaaagttaatattgttatgtgtgaatttgatcctgtcatgatgatgttagctggttattttgctcgttagttgatgcagtttcttcctagtctcgatggtctttacactttggcatgattttgcagcggctggtgccggttgttcctttccatttttagcgcttccttcaggagctcttttagggcaggcctggtggtgacaaaatctctcagcatttgcttgtctgtaaaggattttatttctccttcacttatgaagcttagtttggctggatatgaaattctgggttgaaaattcttttctttaagaatgttgaatattggcccccactctcttctggcttgtagggtttctgctgagagatccgctgttagtctgatgggcttccctttgagggtaacccgacctttctctctggctgcccttaacattttttccttcatttcaactttggtgaatctgacaattatgtgtcttggagttgctttctcgaggagtatctttatggcgttctctgtatttcctgaatctgaacgttggcctgccttgctagattggggaagttctcctggataatatcctgcagagtgttttccaacttggttccattctccccatcactttcaggtacaccaattagacgtagatttggtcttttcacatagtcccatatttcttggaggctttgctcatttccttttattcttttttctctaaacttcccttctcgcttcatttcactcatttcatcttccattgctgataccctttcttccagttgatcgcatcggctcctgaggcttctgcattcttcacgtagttctcgagccttggttttcagctccatcagctcctttaagcacttctctgtattggttattctagttatacattcttctaaatttttttcaaagttttcaacttctttgcctttggtttgaatgtcctcccatagctcagagtaatttgatcgtctgaagccttcttctctcagctcgtcaaagtcattctccatccagctttgttccgttgctggtgaggaactgcattcctttggaggaggagaggcactctgctttttagagtttccagtttttctgttctgttttttccccatctttgtggttttatctacttttggtctttgatgatggtgatgaacagatgggtttttggtgtggatgtcctttctgtttgttagttttccttctaacagacaggaccctcagttgcaggtctgttggagtaacctgccgtgtgaggtgtcagtgtgcccctgttggagggtgcctcccagttaggctgcccgggggtcaggggtcatgcacccacttaaggaggcagtctgccccttctcagatctccagctgcatactgggagaaccactgctctcttcaaagctgtcagacagggacatttaagtctgcagaggttactgctgtctttttgtttgtctgtgccctgcccccagaggtggagcctacagatgcaggcaggccttcttgagctgtggtgggctccacccagttcgagcttcctggctgctttgtctacttaagcaagcctgggcaatggcgggcgcccctcccccagcctagctgctgccttgcagtttgatctcagactgctgtgctagcaatcagcgagactccgtgggcataggaccctctgagccaggtgcgggatataatctcgtggtgcaccattttttaagcccgtcggaaaagtgcagtattagggtgggagtggcctgattttccaggtgccgtccgtcactcctttctttgactaggaaagggaaccccctgaccccttgcacttcccgagtgaggcaatgcctcgccctgcttcggctcgcacacggtgcacgcacccactgacctgcgcccactgtctggcactccctagtgagatgaaccgggtacctcagatggaaatgcagaaatcacctgtcttctgcggcgctcatgctgggagctgtagaccggagctgttcctattcggccatcttggctcctccgaaaatcttctcttgagaaaagtgaatggacaaataaagatttctcatttccgacaaaagaaaataaccagcattgatttgctatttctgttgttatgagtgcttccaggtggttgtctttggatctgctctgttcctgtgcacctcttcttggaatataaatttctgagcctcaatgtgccctgatgccgttcctttcttccaccgtaagagttaccgaaagctcggcgtccgtgatggggtagagggcttccgaggcgatcgggcagtgtcagtcttcagccgctaagccgagaagatctgggaaggagtcagagagccttgggccagagttccaggggctctgggagtggcggatttgaaattggtgagatgtatcttgggctggtcggtctgaggacctgaggtcctaggtggatctttctcaaggagcaaaaagcaggaggacgggggattgatctcccaagggaggccccccgatccaagtcacagcaccaaatttcatgcacgtccgtgtgaagagaccactaaacagctgtttttaacttttaacccaaattcttttaagtatgcctcatgtagaaacatgagttggattttatgtaagtttgtaagtttatctcatgtagaaagcatggagttgcatttatcttatgaactaagtgaaccatttagtacttaactaaatattatttaaaaaaattaaccacttatgttagtatataattatatgctaatgccattttatcacaattgttttacattatgtaaaacatacatgttttatcataatattctatcataaatgttttacatttgccatcttgttttttctgcattcttttttacgttgctttgcagttttaattttaccacctgctaatcttaaaatgcctttaaaaatatacagatagtccctgacttacaaaggttcaatttaggatttttcaactttacaatgctgcaaaagtgatatgcattcagtaggaaccatacttggaattctgatatttgatattttcccaggctagtaatatgtggtacaatactctcttctgatgctgagcatggaggtattaataagtcccagctcccagtgagctatgcgatcatgagggtaattaaccaatattctatagtgtactgtgttgtcagcattttttggatattgtgttttgtgttttcacattcaattgcgtctacaaaacactcaactacactaatgtatgtgttctgggcacgtttttggtaggctaggctaagctaggataggtgtattttaacacctttttgacttacaatattttaaaccttcattggggtttatcaggacctaactccattgtaagttaaggagcacttgtacttaaaaacttggcaatttgtctgataaaacttctcttctgactcaagaatactcaaataatatggtcttgctcttcatgtacccttttaactttattagccagttcctctttgttgatcaaaaccatgtctgcagcagttatgtagggaaagcatgagtacaaatgaaattggacataccgagattttgagattaagaatgttaagctctatagactaactgtagcataacactatagtgaattgacaatgaattgcataaaagcagggttgtggtaaattggacgaaccagataagtatattggcttttcttaaaaataactgcagcttagaagggtagtttatacattcccctgagaagataaagtataatgtagtttgaattttctatactttgttaaagaaatataattctactggtttctagtttctgtagtgttggtcttctctcacttctgttaatacataatcagtcactaaatccttctcattctttcatcagatttactattttctattttggcaactatttttttaaactcaggtccttaacaattcacacctgtattattacagtgcctcctcattctatttctatactttgttgcaatattatgttatcaaagacattcttttcttacattctcttgtttacatatgtaagtaaggtggctctcagacaaaattgaggcatctcatcctaggcatcagaatacccttcttgcttcactgttgtctgtatctaaactcagacaccacttctctaactggtgtttctattctggctaagcagatcttactgtgttctaaaatacatctcccatttttgtgtctttgttcatattgttcataccatttctcctccctaaaatgatctgcttcttctgtatgaggtatctgtgattaccatatccattcttctacttttacatttcttaatcatataggctgtgcatcatgaatgtaacttctacattgtattataattttttaacatttttgtctttcatttctcaaagaatataacttcagttttttgtgtgtttttggggtgtgtgtgtgacctttctactagtttgtcaaaaatgtttagagtaggacaggagtcttttctttcttattgctctacactcctctaggacactgtctttgtctttacagttgtttgaagttgtgttgtaagtacctctgttttccaacttgataaaaagggaagagatcatggaagactgctcactgacttactttatttatttatttatttatttatttatttatttatttatttattttgagacagagtctcactctgttgtccaggctggagtgcagtggtgcgatcttggctcattgtaatccctgtctcccgggttcaagtgattctcttgcctcagcctcccaaatagctgggactacagacgtgcaccaccatgtctggctaatttttgtatttttcgtatagacggggtttcactatgttggccaggctggtcttgaactcctgatctcaagtgatccacctgcctcggcctcccaaagtgctgggattacaggcgtgagccacggtgcctggccacttactgactttagaatctcggctgcccaccagcaggtataaggatcatcttcagatcaggaactccggtgctaatagactgaaactgaaccttgtcttttaacatctccagggttttaatttatctttaaaaactactaaaatttcaatttaataatctcaaaggatccttcccttctatgatttttaaaaatgtatacaataatctatctgtgtcatagaaaatcaatcactattttaaaaatccatcaggaatttctttttaaatattgtttctttgtttactggaaatgaatatggtataatctgtacacgtaagctatagatatatgtcaactaaaatttggtaatcagattgtccactgagagttaaactatgatttaaattaggggtccccaacctccagctgcagactggtacctgccttggcctgttatgaactgggctgcacagcaggaggtgagtgagcattacagcctgaactctgcctactgtcagatcagcagtggtattagattctaacaggagcacaaaccctattgtgacctgcacatgtgagggatccaagttgcatgctccttatgagaatctaactaatgcctaatgatctgaggcaggacagtttaatcctgaaacaatcccaactctgctcaccatccatggaaaaactgtcttccatgaaaccagtccctggtgccaaaaaggttggggacaactaatttaaatcataacagataagacatacaaaactccttgaagagacagaatggttcctaggcttcctgctaaataagactctaatgaggccaaagataattatcctacccccccaaaaaaaaatttaaatcagaagtttgttaggttaaatacacacatattaactttaatatgtacaagtactggatactaggagtccaaaggtagtaccctttggactactttaaaatacatatatatttcagcagggcgagatagctcacgcctataatcccaggaatttgggaggccaaagtgggcagattacttgagcccaggagttcgagactagcctgggtaacatggcgaatcctgtctctacgaaacagacaaaagttagctggatgtggtggcatgcatctgtagtcccagctactcaggaggctgaggtgggaggataggtggagcccaggaggtagaggtttcagtgagcgagatcatgccactgcactccagcgggggcaatacagtgagaccctatctcaaaaaatacatgggccgggcacggtggctcatgtctgtaatcccagcactttgggaggctgaggcaggcggatcacttgaggtcaggagtttgataccagcctgatcaacatggcgaaactctgtctctactaataatacaaaaattagccaggcatggtggcacacacctgtaatcccagctacttgggaggctaaggcacgagaatcacttgaaaccaagaggcagaggttgcagtgagccaggtgccactgcactctagcctgggtgacagagtgagataccatctcaaaaaaataaaaaataaaataaaatatatacacacacatataatatacatatataacacatacatatatatttcaaatgaatattgacaatatttcaaaataaatgttttaatcaatttttgtggaaaaataaaattttaccatcttaaccattactttttgaaaggtagtatttgcacataacccaaatcgcaaaagtctcataaacagttttcatcaaaaagcaagtctccatcccagtcctgccccatccatagttagttaccttttctggaggccagtttcttgcttatttttccagagatacttcattataagcattaagatatgtatatatgttgtgtgtacataggtgtatttttccagtaactctttttcttgtactttaaattgtttccaacttgttgacagacatttaggatctttccaatcttttacaatttcaatgttctacgaatatttttacacatgttatttcacacatggttaaatatttctgtagaataaattcctagaagtgcaactgttggatcaaagaatatatggatttttattttaaatagatattgctgtactggcatctatggagattgagtaccaagttacactttcataacaataaacattatacttaagagcctgttttccatacccctcaatacatccttttggaaaaatgggactttggaaagttacttttttttttttttccttttttctttttttgttcttttaacccaatggttcctttagagacagggaagtccctttttacaagaaccatgtttttcatccttttgtcacttaacaatagaaatcatttagcaaatatcaagttttgttaatgtgagacatacttattattagctgaaagttctaagactattctgttggggaaattaagattcacaaacacctattataaatattaaattatttctatttgcattaaattttaaggtagattttaaaatctactgacattctggatacaaagtctacttacaattattctatcaaaaaaaattgaaactctgaagctcttcatttagataatcctgtaactgatatttacaacgtgataatctcttcaaggagtccagggatcttgtacttacatattttatggtggagcaaaaagtcaaaggataaatgctgagtcaaggaacagaagaaaaaaaaaacatgagaaatagtaactatgaagacaaagattcctttctgaaaggagaatgctttggaaattttgttttaaaatgactctgggggaaatgaggggacgagaggggaggaaagaaaagaagggagcaaacaggaggggaggggaggtttacatctttagaaatcagttatgaaacacacagcaattctggccaatgtcagaaagctgaaaggtatgaagaaaatatccttcccttcgaggcacaagcactgacctgtaaaagttgtgttgcagtagctctctgctcaggattcttcaccaaacactttttaacaaaatcggtgaaatcatcggaccaaagttctggctttctgaatgttggtggtggatttgtgggaatcataaaaatagcctagtacaaatgaaatatccaaaagacagtaagaatcacactagcacaatcaaataaacaaatctctttatctgtctttttatcagactctaaatttgaaaaacaaatttaagctgttctaggatttctagtaacactgaaattcaggaagccagtccatctgctactaatgtaatcatttcccattaaatttcctctatttgaattgtagctcattgagcacatcattctttattttacctattacttttttttatcagtctctaaagaagactatatttctgacccactaaggactttccctaaacatatatattcccaaattttgctactacatgccagatttacttcttgtttcagttttatataagcattgctgcttaaaatgggtagtaggagtccaatttgcttttgcaatccagaatatttaagtaaaattactgctataatttgaaataatacttgacagagccaagacttttctctttttaaatatgagtcaaaatttcaaatgaaaaatttcaaaggtaatatactactttaatttattactaatgattgagtacttataatttagtggtaatgataatacattcagaaacctcaaaaatcaaaagccataaaaagagtccatctcatctctcgcctcctagatagtcaccctggcctgtttttgcttttaatctgagtatgtttatgacccaagaagtagattaaaaaaacaaaaacaaaaacctgaagacattctaaatatgaaatacaagtcagttagggggttaatgtagatgtcccaacatgagtaataaaatgttcaaactagaatagtatctacaggaatgaaatggaagaaatgaagcatgagatacttcaaaggaggaaccaagagtacatgctaataatattgttttggagaggtgaaaaaaggaagcatgaaaaattactccagaattcaagaaataagaaataggtaccttaaattgcaaggcactcaggtattttaataattgcctatatcattcttttgaatgccctcagaatatgcagccatttaatataatgcattatcattggtttcttacttggaaagtgatcaaatggactttctgtggacacagcagcaaagactcaatatccaagtctgttgattataggttaagagtcaatctttttaccagtatatgcatcttctttcaaaaaacgtaaattctttaatagattagaatattttatatacctcacgtcatgttatacatattacatctatgatagtctttcaaaagcagtgtagccagtattacaaaacaataaacatctttcaatcaaacaaatatttataaagcatttctgtgtgttcagaacaatgctataatttagaggtatcaaaacaaagggccacaggccaaatagtgccagtggacctacttcgttcagacaaaatcaatctcacattgccacaagatgaatctgctgtaattagactaatttaaactaggacatatgttcttccttttgcgtgagctctatctagcctggctcaattatctactttatgtgatggtccctttaaatatcagaccttataaacccggctattacagtttttaaaataggatacatatctcagacccccagagctcacagtcaacttgtgcagaaaaaaaaaaaaacacatatgaaacgaatagcaaacaactgagtgccagacaatgaaattctgcctgcaaataacctaattaatctcagacagctccacagttgaggcagaacctaataaggctttaaaaaatgagtaaaatggggttaaaagcagctgctggaaaaggcacacaaaaccacctgctacttccaactagagaataaaaataaatttgaactctcatctctgtgaaacagttcaaaggacttacataagcccctatatagactgacctcaaactgcaggtaaattatactagattgtctagataaatattgttcatctgcacttctgttgtaaactggtggataacacaatgatttatgtccttgaagccaatgctctcctttgaactttgaggcaatgagttgcagtcttatcttgagataatcttaacatataaggctcaccttagcagtagctattagaaacccaaggataaaaagcttaactctaactcttatttacccagtactctcataaagtgaacctaaaatgtcacattctaccctcaaatatgcattgaacaagcatgaacaccgagcatacagtccaaacaaataagtcttagcgtatgatctacaccaaaatgtctccaggaaaaccactatgccatttatttccattttttaaggttagctcatcaataatagattttcttgacagccttactgtactaatttaactaatttaacctaataatgaaccacagaggatcctcttaagaatctctaggttttatatgagttgattaggtattaggccccttctatagaaagttttggcaatcagtggctcactttagactaacaattcattcccttgccaccaaccaaatcacagggacacacattacagccatataatttatcttatctctaacaccattttgattgaagaatgttagtaaaataaatgacatgattatccttgtgtttgtttctacacaatgtgttgcttaactacataccaaacctctgattatgtttctaaaagaactactctgatcacaagcagtttaataacgcaagaaatctaggtgcttcaaaacaactaattatcttcatgcctgaaatgtcatgccttagactgcaagagtacccaggagatgtggaaagggctgaaaatgagaatcaacaatgactgaactttataatctcagtggaatgagtcaacacatgtctgactctacagcagctgagtctgtgaatgtatagaagtgatgggcatgccagaataacaaagaaattcatgctattatttaagaacctcagatatatgagcaaaaggttatcttcacaacaaataaatgagataaaggatgagaaaacactataaaactataaagaagtaaacaaatatagctgtttcctgatagcaaacataatacacaggtaacaagctaaataaaattttaaaataatttctggaaaggaaataaagtaattacactaatttataaaagacagtacaaataaaagcaaacagtacaatgtgatgaggccaatactggacatgagtcagaaaaactggcttgagttctaaatcactacctgactgtgtggctttagtatcattttgttttttttttccaagtaaggaggttgaactggatgtttatcaggtcccgtactgggtataaaaagaccctggcactctttaccacgtattaaaaaaccctggcactctaactgcctagcaattgaagggtaaaattatactaaacaagtattaaattgctagttaggaaagggatggagaagaggaaaaagagggaaggacaggaaaaggccttttagatgttaatataaaaatgtgaatctaggccaggtgcagtgactcatgcctgtaatcccaacactttgaggggctgaggcaggtggatcacctgaggccaggagttcgagaccagcctggccaatatggtgaaaccctgtctctcccaaaaaacaaaaattagccaggcatggtggcaggcacttgtaatcccagctactagggtggctgaggcagaattgcttgaacctgggagatggaggttacaacgagccaagatcacgccattgcactacagcctgggcaacaagagggaaactccatctaaaaaagaaaaaaaatgtgaatctaaatttttatcaccattccctcaaaagcaaatatgaaatatacagaaattttgaagagaatagtaaatctaaagtgaaactttctcctataataaagtttccacagtaagcacagagttaaagtattgggaacatgaactcacaattcactccagttccagtagcaatcattaatctggccaagaaaggccaatgtgccagcctggaaaccaaattaagggagagggtgcagctggtattctggaagtacaaagcaaataagagaaccagctctagatggcactgggtacataacagcaccattattagtaactatctgacctatttaactactctatgcctctgttcccatatcttaatatgggaatgttagggctgttctgaattttaaatagattaatacatgtaaaacacttagaatagtgcctggcacaattgtaaatgctcaataatgtgagctattattaacctaattttacgactgaggctcacaagagtaagctagcttattcaagatcacacagctagtaaagtgaatgtcaaaattagaacaagtttgattccttagcatatgctacctcacattaccactgcttccatcagatttctgctgcacataattttattttaagataaaggctctgttatatacattcagtctctagaaaaaagtggaaaagtatttgtaacaaagaagattatagttttactgtctctaacggtggaaaactgaagaaaaaaaaagtcaaacaattgagggtgctaagtaaactatatatgaataacataaagtaacatattgccataaaaactgacaaatgtgtgaattacaaaaccacaaagaaaagttcttaaaaagcaaaaatgagggagtaaaacagtaaagactgctttcacataaaaatgactagtatgcagcaataaaaactaaaagatggtatagaatcttaaaaatttaaactgtcaattcatagcagcaattatgtacaagattgtataagtgtctttaaaatttatttttactatgatggtttttaaatttttttttacttttaaaaattatacttgcagctaggcatagtggctcatgcctgtagtccctgagctgagaggctgaggaaggtggattgcttgagcccaggagctcaagacaagcctaggcaacacaatgagatcctgactctatttaaatatatatacatatatttaaaagtatttaaaaattatactcgcaattgcaaaagcttcatttgataccaccccttaagctgtcacctattccagtctgccccacaaccacctcttactcatgcactatttaaatcccaatacaatcaattgtaaatcttaaccatctttcaagactgaaatataatatccctttaatacaatccaacaatatcataaaacatggctgtagagaaaagcaaaagtgaacaaaagccaacacttaaagaactttatcacaaatttcactctctcagatagaagtcctatgatcagttcaactgacttttgtaagcacataaatgtatccatacctgcaatatattaacttcttcaagaaatttagagtctaatggaatataaaaatgtatatcagatcattttaataaaatagtgtaagtgctcaaatacatgtgagcaataggtattacaaaggatgacttagcccaaataggtatgtgagctaaatgggtatgggaagatgagatttcagctgagtcataaagaatgagtgagtcagtgaagcacagaaaggagaccagcatcttctcagttgtgaagtttgaaacctcatggagctgtgagagaaactgacttatttcagatgtagggcagggaaattacgaggtgagccaaaggcatcttgttgcccataaagaaagaaatcactcaaatactaactggatcacatcagaagttcagcacttgtagaacttagtatcagccataaaagagtctgatttaactgatctggggtgacgacaaggcacaatattttcttacatctcccaagcaattccaatatgtgagtaacatggagaaccactattctaaaatataaaatacaagacaagtgctatcactgtttaatatctcaacttcagaactttccatattttaatattgtactctgattagttataaactcattctaaatgccctggataacatgaaaactacctgaaggcaagacagtgtcttctattgtctgaatgtttgtgtctcttgcaaaattcttatgttcaaagcaaatcaccaacgtgatggtattagaaggtggggcctttgggaggcgattaggtcataagggctccacctttgtgaatggaattaatgccctcataaacaagtccccacagaaccatctaatcccttctgccaaataaggacacatagaaggtgccttctatgaggaacaagccctaactagacaccaaatctgctagcacctagatcttgaacttccaagcctccagaactgtgagcaatacatatcttttgtacataaattacccagtctaaggtattttgttatagcaacccaaacagactatacaatcacttaagttttatatgtcaactgcattaggcatagtacttctccatagtaaaacctaaatttatactgagagtgttgatataaagacatccagttaagtatggtaactgaacatactgatttacttcaactccttccccaaaatcctgctaaagtacagtaagaattttaaaaaggcttaacctccaaagagagaagggcaatagaaaataagagacagcaataaaattttggaaatagaaagtagatgaaagagtcataactgactcaaaagatctgagaaatcagtaagaagcacatcaattccctccaaataactaaaaaaaaaaaaaaagcctaagaacttggaagtaccaaatatatctaaagatagtggacacctgtaacaaggagcacacctggtaccaagatcttggcttctaaaatgccaatccccagtaaaagaaacctatgctccttgaggaaatgactaatttcaaaggtcaaaataggaaaatcacaaggttagctctgggtatcttgctaggccagaaggtaaggaaacactcaaagattaatggtattatgtcaaaaggacatataaataaccaaatttaggataatttgagcatcaaaataataatagtaataatgactataactgattataacaaattgaaaacaattagtctacagtgttttttttttttatttttgagatggagtctcgctgtcacccatccaggctggagtgcagtgacatgatctaggctcactgcaacttctacctcccaggttcaagcgattctcatgcctcagcctcccaagtagctgggattacaggtgcccgccaccatgcctggctatttttcacatttttagtagagacaaggtttcaccatactggccaggctaatctcaaactcctgacctcaaatgatctgcccaccttggcctcccaaagtgctgggattacaggtgtgagccaccgcacctggcctatgacaatatttttcaaagagtttaagaaaagctgttctttatagaaaaattctaaaaatacacagtaactgaaatacagtatcaacatattgcaccctcaatgtaatttaatgatcaattcaggcaaggaacaccaatggatacttgagtttggatatctgtcccctccaaatctcatgttgaaatgtggtcctcaatgctggaagcggggcctgggaaggaagggaagaaggaaaggaaggaagaaggaaaggaagaagggaagggaaggagggaaagatgatgtagagagatagaatgaataatgcccccaccccgcaagatgtctacgttctaatccccggacttgtgaatatgttactttacatggcaaaaaggattttgaagataagattaagttaaaagtcttgaggtggacagattatcctaaattatctaggcaggccaaatgtaatcagaagggtcctaaaaagtggaagagggagccaggagagtcagagggagatgtgagtttggaataatggtctgctttgaagcagtcttcaaataatgctgctttgaagataaaggaagagggccatgagccaaagaatgtgggcagcctttagaagcttgaaaaagcaaggaaacaaattctctctgagatactccaggataaaaaagcttccctgccaccacttcagatgtagcctagtgagatatgtgttagacactgtattttggaaagctccaaaataatctcctttgactccatgtcccacatccagggcacactgataaaaggcgtgggctcccaaagccttcagccactccatccctatggccctgcagggttcagcccctgaggctgctctcatgggctggcattgggtgcctatgggttttccaagtgcatagtgccagctattggtagctctatctggaggggtctggaggatggtggccctcttctcacagctccaccaggcagtactccagtgaagactctaaccccatatttccctcttgcattgccctagtagaggttctcatgaaagctacagccctacagcagacttctgcctggacattcaggcttttccatatctcctctaaaatctaggctggggttcccaagtctcaactgttgccttccttttagttatgaaaatggctgcagctggcttttgcaccctcaaataagtttttcttttctaccacatggctgggctacaaaattttcaacttttatgttctgcttcccctttaaatacaagtttgagttttacatcatttctttgctcatgcatatgggcacaggttgttagaagcagccaggtcacctcttgaacactttactgcttagaaatttcttctgccagataccctaaatcatcagtctcaagttcaaagatccacagatccccagggcaggggtaaaatgccactaggttctttgttaatgcataacaaaagtgacatttgctccagttcccagtaagttcctcatctccatccgagacctcatcagcatggatttcattgtccatatcactatcaacattttggtcacaatttaacaagtctctaagaagttccaaactttccctcattttcctgtcttcttatgagccctccatactcttccagcctctgcctgttacccactttcaaagctgcttccacattttcaggtatctttatagcaatgccctactccttggcactgattttctgtattggtctattctcacatttcaataaagaaatatctgagactgggtaatttataaagaaaagaagtttaactggctcatggttctgcaggctgtataggaagcatagcagcttctgtttcagggagacctcaggaaacttacaatcatggtggaaggtgaaggggaagcaagcacaccttttttttttttttttttttgaggcagagtttcactcttgtcacccaagctggagtgcagcggcatgatctcggctcactgcaacatccgcctgcccatttatggtgataacaacttcttcctctcttacttcctccctctctgtcttcgccctgcccccagctatccgtctatactagttttctatttctgctgtagtaagttatcacaaatgtagtggttcatacaacacaagtttattatcttacagctctttaggttagaagtacaatatggcttggctctgtgtccccgcttaaatctcctgtcaaattgtaatccccaatgttagcggtggggcctgatgggaggtgattggaccatgggggtggagttgtcatgaatggtttattatcatccccttggtgctgttctcatgatagtgagttatcataagatgtggttgttaaaagtgtgtagcaccttccccctttctctcttcctcctgctctagccatgaaagatatgtttgtggccgggtgcggtagctcatgcctgtaatcccagcgctttgagaggctgaggcagtcggatcacctgaggtcaggagtttgagaccagcttggccaacatggcaaaaccccatctctgctaaaaatacaaaaattagccaggtgtggtggtgggtgcctgtaatcccagctacttgggaggctgaggcaagagaactgcttgaagaagctgttatctccataaatgggcagtatcaggctagtatgatactgctgtagtgccatcagtatgtggtctccaccttccaatttacttcatggtttaagatgggtggttgaacattaccacacactgactccagaactcaaaaaaaaggggaagggaatggcaatatagagtattaatcagatctctttacccaggctccctggaagtccaacacaacatttctcttttgcagtgttctgaacacttttgaagctcttttccaagaggctgcaaaagcccatggaatttccagagatataaatgtctttgttatgctaaggagttgacacatgccaactgaagcccctagatagcttcaggatacaggatggtcagcagaaagaataagcatgtaattagcaggttagtatatttagctgcctgacctctggtgagtggatactaaagactgagctcaaacaaatggccaaaggtttaatcaatcattactacttaatgaaaccccagtaaaaactctgtacatctaggcttagcagagcctcctggttggcaaacacattcacatgtcctgattctacaaaaggaagtcacacaggctctgtgttccctctcagacaatcatatgggtctcttcatttgactggtcctcctgattagcatcctttataataaacctgtcattctaagtatagttctttcctgaattctgccagtcattctagcaagttatcaaacctgaggggatcaaaggaactgctgaatgtataaccatttagtcagaagtatgggtaacctagggacaaattaagtgtagctggtatctgaagagtggtcatgttggggatcatgcccttgaacttgtggggtctgagctaactctggatggttagcagtagaacagaaccacagtacactcaatttgtgttgaaatagaatactgtaattcaggtggtattcaaatgtattttcactgtttttcaaacatagcaaaatagtgaaattgataagcaactgatataagaagcactttttagacaaaggtgaaaaatactgtttctctaacagcttttctctacagttgtggttctcgaggtgttcatgaactccttcactgggccctttcagggatctaccaagtcaaatctttttttcataaaaacactaagccattcttttcctttttctctcaattgacatttgcactacaggtacaaaagcaatgacagataaaattgctggctccctagcaccaatgaagacagtggaacaaaactgtaatcattgtattcttcattgtcatgcattcacaatttttttgaatctgtgaattcacaaaaaagacacttttgattaagaaaatccttgatttaaaaaatactctttttagcaaatctttttagcatctttttagcattttgtagtgaaatgagaaatacgcataaactatacctgctacataatgaagtacaatggttgtctcaaggaaaattatctgtgattaaattgcatgttgaactacagcttttttcatgaatcatctttttcatttgaaagaaaaactgagagataaactttgattattcagatttggatactcaacagacattttctcaaaaatgaatcaactgaacctatgacatcatggaaacacagatggtttttgataacaattataaaatttaagctttcagttgaaaagtcaaattttcaaaagcttctatctgccaccatgaacttaacagtttcctagtatttagaaacttttctgatttttccaaatgacaaatacatgacattacccgttcacatatgaataaagatctattccaagtacaagatagagaaatagattttaatgtaacaaaatagaaaaactcactactatggtttcagattctaatactggaattaatctttagaaaattatcactgttgaattttggtgtagtatgaaaggaagaatatcataattaccagaaaacaaatgattagaatattgctccatcttaatcacatatcatatatgtgttaggccagatatttttcatacatttccattgaaataatgtgttacaacactcacaaataaaaaaaaaaattcaaccatcttctattaagctatccactcattatttttatgaaaatagtaattgattcatataaacaaaagctcttgggtcctcaattctttaaagtgaaaaggactgctcaggccaaaaagcctgaaaaccactattctatagtgaatgcaaaccagggaaactaacaggaatattttcttctgtttgatgcatgttcaccagcaacagtaccacaaacttgtttcattttatattatgtccttctaatttgtttacttttttacatatttgaaattttaacacagataaaatttggtatatagtttattttttctaagtaactgtattttaatatgcctgaaaaaataatgaagagacatggttcacaagacatcaaaagagcatccagaaaaatgaaattggtaatgtgtctccattctgtccaagaggatgccctggaccactaaaaaatatacctggtccttgcaatagataaattcaagtggtagacacggatgagcatagcttgatgcagtagtcaataagatcatccaactaatcaccttattctagtaaccattttcacctgacagccttctggtcaaaatttggattcccatgtaaaactgacttcagaagagaatatggtgatgaacatctgattacttgagggttaaatatctatttttaaagtaataaattggaattttgatttgtatatcagtgaacttggttaagtccatcctatgagacagttctatatttattacattggcagatcggtcttcgaataataaatgctgctctgtgatcttgtctgggtagccaactgatcttccttagaaaatacacaaccacaacccttccgcaagcattatgctcatactacatcactgattacctaaattcacaccctgacaaagaagagggctctgccaataacaaagcatattaagttatatatttcagaataacggaataagagtgaaactttactaagaatagtgaataaaataatattttaaatgttaaataagttttgagataaggccttttaatgtttaattttagaataattctaggcattttaacagcataataactcctcaaaaaaagaagtgtatggtttggatgtcactttaagccatgaaatttttatctcagctatttaaataaagtatctcatctgaaatatggtacaatgtatactttacactgcattagctataacaataaataatggatcataaacatttacatataaaaagaacaaaatgaaaggtaagactatgcggaaaaaatactagaacaaccactagaagtttacaaaaaataagaagacagtacaaaaacatcaataaaatagattgaaaaataaagctgatgaactaattgccttgaatgtatcagaaaacttaagggaagacaaaatattagaaatcagtggccaggcatggtggttccgcctgtaatcccagcactttgggaggctgacgcgggtggatcacgaggtcaggagatcgagaccatcctggctaacacagtgaaaccccgtctctactaaaaatacaaaaaattaactgggcgtggtggcgggcacctgtagtcccagctactcaggaggctgaggcaggagaatggcatgaatctgggaggtggagcttgcagtgagccgagatcagagatcgcaccaccgcactccagcctgggtgacacagtgagactccgtctcaaaaaaaaaaaaaaagaaataattgacatatatcagataaactaattgcatgtattatcaaaacaatttcagaagcatgataaaattaagaatctggaagaaaactttcatagtaacttatcttagtaataaaacagaaaatgaatcagagcttcaaaagcaagaaagaagaaccaatacccccatccaaaggaactatctggaatgtaccaaaatgtttcaaaacagaaaaaaaaaaaccatatgattacaaaatgagaaaaaaggaaataatgaacaaaagattcatgtaatgtaacttagtataatttgaccataagattagggaaataaattaatactagtcattagcagtttttgtatcatctggtaaaagagttccaaggacaagaagttcaacaccatgaagtactattagaagatcagaatattatatgcaatactgcctagcttcattttaccaaagtgcaacaataattcaattcaatccaaagtaaatcaatagcatccattgattttctttctattctattcccacctctgactcctaaaacagtgcggcacacacgtcttagctctatcccagtgcccccaccaccatatgccacccttgcaatagctgtgtcttgtccatcactagcctggtgcagtctgtcctaatgaggaaaagcagggaagatgcccgcataggctcaggaccatttaaatggggaatcctgggatcctgggtctgcagagcatgatctaggagggaaaactatgggctctagcacagagatgtagcatggcccatgcagggcataatctttgggcaaaggctccagttaccgggcctagtgcctataattgacatactatcctcaaaattatcatttagcataaaatcatcctgattcgagttaaaatattatgtcactttacaaccaaagtgcaaagactaagttgttatagaatctgtgaaagttaatcaagtaatcaaaacatagtaaaatataaaaatgctcattataaagaacacatcattcaaaatccagtcatatctaatagagactacaaaacttaagcagatgtttacacaaaggcctataaactcaaactgatacaaagaactgggttaaagctaaacaagcagaggtcagcacagagctcctgtgattgaatcacaataaaacaatacactagtcctaagatagcaagaatatgatgcaataagtgaggctctggtcccaaaacagtataatgcccagtacaaatcaatttcacaaaaatctataatagaagtcaatgtaaattaggattaagaaaatcaaaattaacaacaaaaaatatatgaagaacaaaaaagaaacaactgaaaatatgaaaagtttataattaaaaaaagacacacagacatatatacatacatcaaagtctacaatcagaaaaaaacaatagatctcagaaatttagtgtgaaatttaagagtaaatagtaagttttagaaagaaaagaaatctgtcaacacagcccctcattttcgtgcctagggaaaataaggcttaatctacagccttggccaaatatgattgccagataaataaacccttagattctaccataagttaattaaaatgataaaaaaaaattcatatattagtttctaactccaaatttctttaagaaaaccttatgattcacaagcaaccaaccaattccaaactctatgccagtggttcttaacactggctacatattagaatcacctgggaagcattctaaaattgcttattccctgaactcaacccaaagaatctggtgttgtctaggcctaggttggttggtttttaaaaaaatgtcctatatgagtgtaaggtgtatcaagggtcaaagatcactgcatgaatcaaacagtatggatccaaattcccactacatttagcacaagtttggggaataaaaacttaccatttttagagacagagttcataaatagaatgggagaaactaggaaaactaattcaggggccaactctaggcaacaacaatcaaactgttccccttgctaaataaataaatacatatatagtatataaaatatatataaatatacatataatagacatttatataaatatatatgtgtatgtatgtcactatattttatatttcatctaaaattccataaattagaaagtcattgctgtttaaaaactatgtgtaacttctgcttctaggaagatagagtagatgtacattttcctatttctctcgttaagtacaaccaaaaaccatggacattatgaataaacaagcatacgaagatccagactgggcacagtggctcatgcctataatcccagccacttgggaagccgagtggggaggactgcttgaaaccaggaattcaagaccagttcaagaccactgtttctaaacatatatatatatatacacacacacacatatgaattctatatatacatatatatcaattctatatatatatcaacccatatatatagagagattctaatatatatatatatatatgaaagatggagagaaggcagaacagctagggatcttggaacccaaggaacataactgatgacttccctggatcttctttgtcccttatatattccacacttggggccagataagccaacaaccagaaaaagctaacaggtacaaacaaaaaagctccgacaaaaccctgcccaaaagatgaagagaagaacaccatggaaagaagaaaactttaggcaaatttcactctatgtcagccaaacaccacagaaaaaactgtagtcccactctaaccatgtcagaaaggcttagtggacagcctaaagttctatcctcatgagactataacaaggtcccacaatactcctgacatggtgagaaaagaacaagtagggagccaagaatttcacccctctggaaagtaaaaggacagccccccctagcagtgtcagtagacagcaagtagaacctgtacttcctctccaaactggcagcaatgaggtgatcctcccactacccactgaggaggactagaaaaaagttaaattaagactttcactaaccagtggaaattaggtaagcaccaatacaatagagactacacacggagagctagaatcaccactctgactcagcaataatgaggagccactcctgctacttgagtagggcaacagagactgaaaggggaatctggacttcaacaaactctacctggcagtgatgagctcccttcccctcttaaagtaatgtcataaacattcacctaaaacagaaggtttaaataagatccagtctcagaatataatggggaaataggtcctgttttcaaccaaaaattactcatcagaccaagagtcaaaaaaatcacaaactgaccaaaaaaacaaaaaagataaaagtcaacaccaaaaaaagacatgtcagaagtatctgacaaatattttaagagtctttaaaaaaatgcttcaatgaacaatcatgaaaataactgaaacaatgtaaaaatagaaagcctcagctttaccagtaccttgtgataatttatgtacatatagaataatactaaaataaaccaccaaaaagttttgcatagaaatatcctcataaacactatagataaatcaaaagaaaactcttaaaaaaaatcaagtaacccacaggaagtaaaaaaaaagaaaacagaaattaaaaaaatgcaaaactttagccataacatattaataattacattaaatgtaaatcgcctaaatatgccaattaaaaggcaaaaactgaaaaggtagattttaaaatgcaactcaattatatgtagtatataagaaactaacttataatataaaaatacaggcatgttgaaagaaaaatgatggaagaaatataacatgcaaacaataatcaaaccaaagcagaagtggctatattaataacagataaaggagacttcagcaaagaaaattaccagagacagagagggacattacatagtgatgagacataattcaccaagaaaatataacaagcactaatgtatatgtaccaaccaacaagctataaaatatatgaagcaaaaactaaaacttgaaaggagaaatagataaattcaccattatcagtagaaatgtcaatatcctctaacaacaagagataaaacaaatagacagaaaatcagcaaggatacagaagaaatcaacaacaccatcaacaaaatttatagaataccccacctcaacaacagcagagtacttattactttcaagtaatcatggaccatataccaagagagaacatatactgaggcataaaacatacatcaacaaattttaaagaactgaacagagtagagtctccaagcacaatggaatcacattagaaatcaataacagagacataataggaaaatcaagcacttgaaaactaaagaacacgctttcaaataatctatgtgtcaaagaagatgtctcgatcgggggaggagccaagatggccgaataggaacagctccggtctacagctcccagcgagagcgatgcagaagatgggtgatttctgcatttccatctgaggtaccgggttcatctcactagggagtgccagacagtgggcgcaggccagtgggtgtgcgcaccgtgcgcgagccgaagcagggcgaggcattgcctcacctgggaagcgcaaggggtcagggagttccctttccgagtcaaagaaaggggtgatggatgcacctggaaaatcgggtcactctcacccgaatactgcgcttttcagaccggcttaaaaaacggcgcaccacgagactatatcccacacctggcttggagggtcctacacccacagaatctcgctgattgctagcacaaagcagtctgagatcaaactgcaaggcggcagctaggctgggggaggggagcccgccattgcccgggcttgcttaggtaaacaaagcagccaggaagctccaactgggtggagcccaccagagttcaaggaggcctgcctgcctctgtaagctccacgtctaggggcagggcacagacaaacaaaaagacagcagtaacctctgcagacttaaatgtccctgtctgacagctttgaagagagcagtggttctcccagcacgcagctggagatctgagaacgggcagactacctcctcaagtgggtccctgacccctgacccccgagcagcctaactgggaggcaccccctagcaggggcacactgacacctcacacggcagggtattccaacagacctgcagctgagggtcctgtctgttagaaggaaaactaacaaacagaaaggacatccacaccgaaaacccatctgtacatcaccatcatcaaagaccaaaagtagataaaaccacaaagatggggaaaaaacagaacagaaaaactggaaactctaaaacacagagcgcctctcctcctccaaaggaacgcagttcctcaccagcaatggaacaaagctggatggagaatgactttgacgagctgagagaagaaggtttcagacgatcaaattactctgagctacgggaggacattcaaaccaaaggcaaagaagttgaaaactttgaaaaaaatttagaagaatgtataactagaataaccaatacagagaagtgcttaaaggagctgatggagctgaaaaccaaggctcgagaactacgtgaagaatgcagaagcctcaggagccgatgcgatcaactggaagaaagggtatcagcaatggaagatgaaatgaatgaaatgaagcgagaagggaagtttagagaaaaaagaataaaaagaaatgagcaaagcctccaagaaatatgggactatgtgaaaagaccaaatctacgtctaattggtgtacctgaaagtgatggggagaatggaaccaagttggaaaacactctgcaggatattatccaggagaacttccccaatctagcaaggcaggccaacgttcagattcaggaaatacagagaatgccacaaagatactcctcgagaagagcaactccaagacacataattgtcagattcaccaaagttgaaatgaaggaaaaaatgttaagggcagccagagagaaaggtcgggttaccctcaaagggaagcccatcagactaacagcggatctctcggcagaaaccctacaagccagaagagagtgggggccaatattcaacattcttaaagaaaagaattttcaacccagaatttcatatccagccaaactaagcttcataagtgaaggagaaataaaatcctttacagacaagcaaatgctgaaagattttgtgaccaccaggcctgccctaaaagagctcctgaaggaagcgctaaacatggaaaggaacaaccagtaccagccgctgcaaaatcatgccaaaatgtaaagaccatcgagactaggaagaaactgcatcaactaacgagcaaaataaccagctaacatcatcatgacaggatcaaattcacacataacaatattaactttaaatgtaaatggactaaatgctccaattaaaagacacagactggcaagttggataaagagtcaagacccatcagtgtgctgtattcaggaaacccatctcacgtgcagagacacacataggctcaaaataaaaggatggaggaagatctaccaagcaaatggaaaacaaaaaaaggcaggggttgcaatcctagtctctgataaaacagacgttaaaccaacaaagatcaaaagagacaaagaaggccattacataatggtaaagggatcaattcaacaagaagagctaactatactaaatatatatgcacccaatacaggagcacccagattcataaagcaagtcctgagtgacctacaaagagacttagactcccacacattaataatgggagactttaacaccccactgtcaacattagacagatcaacgagacagaaagtcaacaaggatacccaggaatttaactcatctccgcaccaagcggacctaatagacatctacagaactctccatcccaaatcaacagaatatacgtttttttcagcaccacaccacacctattccaaaattgaccacatagttggaagtaaagctctcctcagcaaatgtaaaagaacagaaattataacaaactatctctcagaccacagtgcaatcaaactagaattcaagattaagaatctcactcaaagccgctcaactacatggaaactgaacaacctgctcctgaatgactactgggtacataacgaaatgaaggcagaaataaagatgttctttgaaaccaacgagaacaaagacacaacataccagaatctctgggacgcattcaaagcagtgtgtagagggaaatttatagcactaaatgcccacaagagaaagcaggaaagatccaaaattgacaccctaacatcacaattaaaagaactagaaaagcaagagcaaacacattcaaaagctagcagaaggcaagaaataactaaaatcagagcagaactgaaggaaatagagacacaaaaaacccttcaaaaaatcaatgaatccaggagctggttttttgaaaggatcaacaaaattgatagaccgctagcaagactaacaaagaaaaaaagagaggaaaatcaaatcgacacaataaaaaatgataaaggggatatcaccaccgatcccacagaaatacaaactaccatcagagaatactacaaacacctctatgcaaataaactagaaaatctagaagaaatggatacattccttgacacatacactctcccaagactaaaccaggaagaagttgaatctctgaatagaccaataacaggagctgaaattgtggcaataatcaatagtttaccaacgaaaaagagtccaggaccagatggattcacagccgaattctaccagaggtacaaggaggaactagtaccattccttctgaaactattccaatcaatagaaaaagagggaatcctccctaactcattttaggaggccagcatcattctgataccaaagccgggcagagacacaaccaaaaagaagaattttagaccaatatccttgatgaacattgatgcaaaaatcctcaataaaatactggcaaaccgaatccagcagcacatcaaaaagcttatccaccatgatcaagtgggcttcatccctgggatgcaaggctggttcaatatacagaaatcaataaatgtaatccagcatataaacagagccaaagacaaaaaccacatgattatctcaatagatgcagaaaaagcctttgacaaaattcaacaacccttcatgctaaaaactctcaataaattaggtattgatgggacgtatttcaaaataataagagctatctatgacaaacccacagccaatatcatactgaatgggcaaaaactggaagcattccctttgaaaactggcacaagatagggatgccctctctcactgctgctattcaacatagtgttggaagttctggccagggcaatcaggcaggagaaggaaataaagggtattcaattaggaaaagaggaagtcaaactgtccctgtttgcagacgacatgattgtttatctagaaaaccccattgtctcagcccaaaatctccttaagctgataagcaacttcagcaaagtctcaggatacaaaatcaatgtacaaaaatcacaagcattcttatacaccaacaacagacaaacagagagccaaatcatgagtgaactcccattcacaattgcttcaaagagaataaaatacctaggaatccaacttacaagggatgtgaaggacctcttcaaggagaactacaaaccactgctcaaggaaatagaagaggatacaaacaaatggaagaacattccatgctcatgggtaggaagaatcaatatcgtgaaaaaggccatactgcccaaggtaatttacagattcaatgccatccccatcaagctaccaatgactttcttcacagaattggaaaaaactactttaaagttcatacggaaccaaaaaagagcccgcatcgccaagtcaatcctaagccaaaagaacaaagctggaggcatcacactacctgacttcaaactatactacaaggctacagtaaccaaaacagcatggtactggtaccaaaacagagatatagatcaatggaacagaacagagccctcagaagtaacgccgcatacctacaactatctgatctttgacaaacctgagaaaaacaagcaatggggaaaggattccctatttaataaatggtgctgggaaaactggctagccatatgtagaaagctgaaactggatcccttccttacaccttatacaaaaatcaattcaagatggagtaaagatttaaacgttagtcctaaaaccataaaaaccctagaagaaaacctaggcattaccattcaggacataggcgtggggaaggacttcatgtccaaaacaccaaaagcaatggcaacaaaagccaaaattgacaaatgggatctaattaaactaaagagcttctgcacagcaaaagaaactaccatcagagtgaacaggcaacctacaacatgggagaaaattttcgcaacctactcatctgacaaagggctaatatccagaatctacaatgaactcaaacaaatttacaagaaaaaaacaaacaaccccatcaaaaagtgggcgaaggacatgaacagacacttctcaaaagaagacatttatgcagccaaaaaatacatgaaaaaatgctcatcatcactggccatcagagaaatgcaaatcaaaaccacagtgagataccatctcacaccagttagaatggcaatcattaaaaagtcaggaaacaacaggtgctggagaggatgtggagaaataggaacacttttacactgttggtgggactgtaaactagttcaaccattgtggaagtcagtgtggcgattcctcagggatctagaactagaaataccatttgacccagccatcccattactgggtatatacccaaatgactataaatcatgctgctataaagacacatgcacaggtatgtttattgcggcattattcacaatagcaaagacttggaaccaacccaaatgtccaacaatgatagactggattaagaaaatgtggcacatatacaccatggaatactatgcagccataaaaaatgatgagttcatgtcctttgtagggacatggatgaaattggaaaccatcattctcagtaaactatcgcaagaacaaaaaaccaaacaccgcatattctcactcataggtgggaattgaacaatgagatcacatggtcacaggaaggggaatatcacactctggggactgtggtggggtgaggggaggggggaggggtagcattgggagatatacctaatgctagatgacgagttagtgggtgcagcacaccagcatggcacatgtatacatatgtaactaacctgcacaatgtgcacatgtaccctaaaacttaaagtataataaaaaaaataaataaataaataaataaataaataaaaaggtcaacatcaaaaaaaaaaagaagatgtctcaagggaaattaaaaaaaatacactaaaccgaataaaaatgaaaatacaacaaatcctgttaaaatttgtaggacacatgctgctacttgaagagcctagacaaagaagaacaaaaataaatgcaagacaagaagaaagaaaataataaagagtagaaatcaatacaatttaaaatatgaaaaaagttaaaaatatcaatgtaacaaacagctattttaaaaaacacacacacaagaaattgacaaacctcttccaaaatgacaaaaaagacaaaaagagtagtaaagtttctaaatatatttttgttttttaagcaactgtaaatggtattgcatttttaacttcaatgtccatgaattcattgttaatgtacacagaaaaacaactgattttttttttttttttttttttgagacggagtctcgctctgtcgcccaggctggagtgcagtggcgggatctcggctcactgcaagctccgcttcccgggttcacgccattctcctgcctcagcctcccaagtagctgggactacaggcgcccgccactacgcccagctaattttttgtatttttagtagagaccgttagtatttttgtattcaccgttttagccgggatggtctcgatctcctgacctcgtgatccgcccgcctcggcctcccaaagtgctgggattacaggcatgagccaccgcgcccggccaacaactgatttttatatcttgcatcttgaaaccttgttgcgcttactcattaattctatgagtttattcattggtattttctatgtagaaaatcatatcatctacaaaaggagatggtttcatttctacctttccaatctgtatgccttttcctttcacttcttgcctttttgagctggcaagaactcccagtactgtgctgaatgagtagtgagagtgaacatcgttcctgttcccaacattaggggaaaacattcagtcttttaccattaattatgatgttagctgaaaggtttttataggtattcttcatcaaattgaagaagttatctttattcctattattctgagatcattcaataccgtaaatgggtgctgaattgcatcaaatttttttttctacattatgtgacttttcttctttagtctgttaatatggtgcattacattgattcagctgaatggtactctccccacccaacaacccagctgtctgtatgttcttaaggtggaagctcagagtgttgttttttttaacactatgaccctgaataaagcaacatatctatatagctagtcccagaatcactggtaattgcttacataagaagctccgtatggccagatgatacagattgtggacacatgagaaaaaccttcttgttgcaagtaaaatatatctgtggctgagaaaaaaagaccgtcaaatgaaaaattctacatacaaaaaaaaaaatcagacattgggcacggtggctaacgcctgtaatcccagtactttgggaggctgaggcaggcagatcacttgaggtcaggagttcaagaccagcttggccaacatggtaaaaccctgtctctactaaaaaaaaaaaaaaaaaaaaaaaattagctgagtgtggtggtgcatgcctgtgttcccagctattcgtgaggcaggagaatctcttgaacccaggaggcagatgttgcagtgagctgagattgcgccactgcactccagcctgggtgacagtatgagactccatctccaaaaaaaaaaaaattggatttttttggtttactttccctgattctattaatcactgaatacaataaaccaaatactaaataggattagttatgactcataaataaacataaggatgtatattacattgccattcattcattgtatgtaaatttcctacagctagactataatatacagcttcccaaagcaatctaaaagtaacaaactttaatgatatagcacaactgaagtttggtatagtaagtgcaaataagtattgcaatgacaattcatcatggtaaactcaagggtctgtaaaaaatcaaattatcgaggaccgagttcaagaagaactatattaatacatagatttctgtaacttggcagagaattccctacaattgctacatttaaagtaatcaacacatttctatatctcagaagaagacggaaattatgtgttcgcctatcctaatgtattaaacttttattacaatagttttagtatatttttagcttaacattaaggtagaaacattctatcaaactaagaaatagaaattgctctgaaattgcaaaaacctgtactatttcccattttaaaatcagaaggattacttctacagcatttaattgttacatcttacaataataaattacatgggactaatatgcataatagaacacaacggtagtagtaataatgattgagcagtagtatatttacataccgataaaagaaaacccatgtagaagaaactgaagaaaataaacgctagagtgaacaaatgatgagtaatgctccaaaatacaagaaaaagaaagaatgggatacagaatagaggttgagagattggacttgagcagagaaggaaccctcttcctccacatggaacatattgtgagggagggaagaataagatgagaaggaggagaaaaagaaacgaagaaaaaataaagggaaggaagaaaggaagaaagagagggggaaaaaagacataaaggaaggaaggaaaagtatagatattgactgttacggactgaattgtgtcctgtccccccaccaccaccactaccaaattttatgtcaaagccctaatgctccatgttactgtatttgcagattgggcctttaaagaggtattaaggttaaatgaggtcataaaggtggggctctaatccaatatgacttgtgtccttataagaagaagaagagacattaggaatgtgtacattcaaaaccaaaggccagggctgggcacagtagcttatgcctgtaatcccagcactttgggaggccaaggcaggcagatcactggagcccaggagtttgagaacagcctgggcaacgtagcgacagcccgtctctacaaaatatacaacaattagccaggcatggtggtgtgcacctgtagtcccagctactcaggaggctgaggtggaaggatcatttgagctcaggaggtcgcggctgcagtgagctgtgatcacaccatgacattccagactgggagacagagcaagaccctgcctcaaacaaaaacaaaaacccaaaggccatgtgagaacacacagagaaggcagccatctgcaagccagagggagacctcagaagaaaccagacctgccaacaccttgatcttggaagtccagactccagaactgtaagaaaataaactgttgttgtttaaatcacccagtctttagcattttgttatagcagcaggaacagactaatacattaagttagacggagggacagaaacagtgaactgctaatagtctccagtttttctttggaccagaaagcaagtctgacaaaaccaaggagagatggggtaaagaaattttgcaacagacccagaagagaatgaggtggtaggcgtaggggaacatgtgaaaggattgccaactgtccatttcagattagaaatcaatcttttgggggcatcagtcttcacagttacataattgcagttaagcagcctggttacgaggaacacagcaaaatgggaaaggtaaaaacctttgaggttttttaagtctgagtgataacctagctctatcagtgtagctgtgtcttgggttgttatctagagttataataatgatagttacatagagtgtgccaataataatatctactccttttagagttgttttagagttatgtaaaactttatcatagagttggtcagatagtagacaataaataatagctactatacttattactatgggattagtgtagtattggtacattgttaggaagatacagcaaaaaagagaaggaaaaaaaggaattaaaagaaagtggttcagccgggtgcggtagttcatgactgtaatcccagcactttgggagaccaaggcgggtgggatcacttgaggtcaggagttcgagactagcctgggcaacatggtgaaaccccatctctactaaaaatacaaaaaatgagccgggtatggtggcagatacctgtaatcccagctactcgggaagctgaggcaggagaatcacttgaacctgggaggtggaggttgcagtgagttgagatcgtgccactgcactcaagcctgggcaaaaagagtggaactctgtctcaaaaaagaaaaaaaaaagaaagtggttcaagtgacagagtagagtcttggctagatagaggagtaaagtgaatgcctgaggatactgacaagctggaaaacaggaggaaaaataagttaaatggcctgaggatgaagtccagttgaattttaaacccaagaaaatgagaaagatcgaaagattggtaattaaaataaaatcctccagagaagactgctgagtgtgaatcagcagctacttcttatatgtaacaccacagagaaacataacaaaaaaagaaagccagctaaatggtcgtggccttgtcattagctagcagtgtatcttgaaagaaggcgcttaaactgtgagccttactgctatttgaggattactgacaaattacctctggtttctcctttattccacttccactgtaccctctctccgacaacacacacatacacacatacacactcatcattatagtaaagatcaagaaaggcagtaaacaagagcaaagatctggaaagaaggcacattttcaaaactgacatttgtcttgtgcatcctcccacttcccttttccctctcccagtcccacctctacaagcccaaaaaccccagctctcactgctggctctgctcccagaaaaagcccaaagtgccatgtttctctttgacctttcttccctccctcccacctattaaaacttccactgagtctatctcagtttaacaagggaaaaggcaaactgattatgccttttcataatgatgccaggatgaacagtaactcatctgtgcttaaacctcccaagtgtgtttggcttaaaaattgaaacgaatctatttggcaaaatttcaggcagaatggaaaggggataatttggggcaaggagattttctttcttccctgttttaaagttgtgaggaagaaaaagaagtgtttgtcgtaactgacaacagacaaccaccacagaaaaaacatccacagcagctcagaatgctagactgctacacttaagggtactttttaggtgtacaggcctgcataggatgctgaagtggggggcttatgatagcaaacatgaggaagcaatctaccctactataaccctgaaaaaagtggttcagaaccatctaccacgtcatggtaatgactctcttttctcttccctttattacagaggctgcccctcaccctgccccccagatgctcccctgataaaaggaggtggggaaaaaggaggcagccataaaggcagcagcaggagtgaactctccatcttagttatttcctgttagaagtggggaaagaatctgcagcatagaagccttaacagaagcctgagtataaagcaagaaaatagctgtagatagaatcacatgaaaaagtgactatacaggaaaaggtgccattcaatgagaaaagggggaaaagtatcactgaagaaaagaaacactctcttcccaaaaaaggtagaaatacaatcaaatgtttcagagcagggatcagaaaacttcggcccacatgccaaatctaaccagtctcctgttttggtaaataaagttttatgggaacacagccacactcattcatttatgtgctgtctatatggctactttcacattataatggaagagctgaatgactgcagcagagaccatataacttgtaaagactaaaatatttactatctggccctttacagaaaaaaggccctgctttaggaggtcaggggtaagaaggggactgagatgaggccatcggatttgataataagtgatctctggcaaatatgaagaaataatttaaaagaagtttaaaagaaactaaatgtattctaataaagtagagacaatgaggataaggtattctttcaaacagcctctaggaacaaaggaagactacatgcaagtctgcatggggaaataagaaattttcttgatctcaccaatcttcctcctcttggagtcactctctttaatcaccaaccaaacagcttcccaaactagaaactgcagaattttggtaagtgattctagctccacactgctttctgtatcctcagttccaggtgcaatgcttagtatacaaaagataatgtttgttgagtaaaacaatttaagagtacagaatgtagagagaaaagattgagaagagagaaaaaaattctgtccccacttcatacctggaaaaacattccatgccacctctaatggctatgtggcttggactcaagtcttaagagtcatcataggccaggcgcagtggctcatgcttgtaatctcaacactttgggaggccaagcccagcagatcacttgaactcaggggttcaagaccagcctggccaacatggtaaaaccccgtctctactaaaaatataaaaattagccgggcacagcagtacatgcctataatcccagcactttgggagactgagacaggtgtatcacttgaggtcaggagttcaagatcagcctggccaacatggtgaaaccctgtctctactaaaaacataaaaattagccaagcgtggtggcatgtgcctgtaatcccagctacttgggaggctgagacaggaaaatcgcttgaacccaggaggcagaggttgcagtgagccgagatcgtgccactgcactaaaaaaagaaaaaagaaaaaaaaaaaaaaaaaggtctggttatttaaaagagcctgagactcctcccctttcttttgctcctgctatcaccatgtgacatactcatgcccccactgcctcaggaagtaaaagcttcctgaagcctcaccagaagccaagcagatgctggcatcatgcttgtatgacctgtagaactgtaggccaattaaacctcttttatttataaattacccagcttcaggtatttatttatagcaatgcaaaaacaagctaacacacacacagcaaagcctaagatttacatctatgtttactaccaaaaattttatagatttagctgttaaatttaggtctttggtgcattttgaattaacatttttacagggtatgaggttggagtctaatttcatttttgtacatgtgggtatctaattgtgccagcacactatgttgttttaacatcaaatgagaaaatatataagataatttgatactacaaatatttgtggttgttaaaattcaggtactaagcaaacagctcagtagaatactacaacaaacatgtaacctaattctcctgtctctagtttctcctttaatatctgttttatatctgtgtaaaacacagtccagtaatgcaacaactctacataaaactaaagatacctactgctgacagaattagaatttctggaaattctgagacagaacttgcccctgatttttccagtttatacaagctatccacaatccttcgctcatggcctccttcctctcttttcaattttccaggctcatctcttaccattgttcccaaccacttggtctggctacacaatgttactagacacatctgatgtgaagtactcttgaaagactctgtagattactcatgctagacttttggctttccttaacctgggggttccctgaagcagaaagaattttatttatccctatattcaagagtccaggagagtgcccaacacaaagcaggtgtttcataaacacttgctaagttaaaggaatacacaggcaggcatggtggctcacacctgtaatcccagcactttggaaggcagaggtgggaggatcacttgaggccaagagttagaaactagcctgggcaaaatagcgcaaccctatctctacaaaagtaaaattttaaaaatcagccagtcctagtggtatgtgcctatgttcccagctactcaggaggctgaggcagaagaacagcttgaggccaggagttcaagacagcagtgagctatgatcacaccactgcactctatcccaggcaatagaggaatatcctgtctccactcccctccacactccaaaaaaaaaaaaaaaaaaaaaaaggaatgtgcctataaatggaagacagtgacgaaggtaaaggaataaagtagacgaaggcaacaggtttggaaaacattaaatcatcttgtttggcaggaaaaattgtctatatagggggatgttgagagaagcctggaaacctggatgggacagcaagagtaaaggccaagtgaggaatttgtacagtgatagttttttagggtaacttgatggatttttagacacagattataccaattctcttttcccccaataagagatttgtgactttggctaaattatttgactcagaaaagactcaagtacttcatacacaaaattagactaatctctttagtatgataggctcagctggtaggcccatcaccctagacacagaagaaaaaaataatcatgctataataaggaagcttgacagtcatttacgagagtttaccaacttttgagcagtgaaatctactttccaaataaactcatacatggaaccctagtacagaaaccttttttaaacccacaataattgaaaggggcatgaaaaaaactggagaccccacacacccaccttccttcctctcacaaacattggttcatataatcaagtggacttcaaatcaaatatggggaaccctaaacactactttagaacatggtcaaaagtttactaatctagagggatccaggtaaagtcatacaaccaagattcccctttgtggctactgattcgaaaataaatgctagggaggaaacaaagataaaaactaaagatggaaaggaaggtcctactgtaattttcctgaccagaccaatggagggcataaactaggatggtagtattaaaaagacagaagccaagcaaatataacatacagaaactgttttcactttgttttccgtattcttgatgggaaccatgctgacccaggagagactgcccctcccaaggctagctacttcttagacagcaaactacccctccttgagtgcttttcgcatgcaaaccactcaatctaaaactacctcccatccatccccagtattcagctctcacagaactcttatattctgggactattagaatagtcccctgttctaataatcacgccagggccaggtatcaaacaacttgggggctgctcttatatgtgactatgccgacattattaaaaccagccaattctaagcctccttaccctgcctcgcctgttccttctcactaaaatcatgataaaggctctcccccatgatttccctagctatttctgcctcctaaacaaccctggtgcttccctatgagcactatgtggcgtggcatatatgccaccctgtctgatgtgccatgccctctccacttagaaactgtatcaatcttttcaatggcagttgtctcctgacgtgttagtttcaccatatttgaataataatataaaccacattttaaaaatagttcaggaccaagcaccaaacaaacagcacgtacttagagaataaaatgtgaagtattaagaatcagtattaaggctgggcatggtgggtcatgcctgtaatcccagcactttgggaggctaaggcgagaggactgcttgagcccacgtgttcgagaccagcctgggcaacacaatgagaccccatctccacaaaaaaattttaaaaattagcaggggtggtggcacacgcctgaagttgcagctacttgggaggccaaggtgggagaatcacttgagcctgggaggtcagggctactgtgaaccctaatggcaccagtgtactccagcctgggtgacagagaggaacagaagaagaaggagaaggagaaggagaaggagaaggaggagaaggaggagaaggagaagaaggaggagaaggaggagaaggaggagaaggaggagaagaaggagaagaaggataaggagaaggagaagaacaagaagaagaagaggaagaggaagaggaagaagaggaagaggaagaagaagaagaagaaagaaagaaacagtataaagatgagattttctagttatgagagatgccaaagcagaatgttttaagagataaacctgacatatagtaaacatttctttttttttattaaaacacattaactataaatatgtttaacatcatttcttatcttcatcattcaagatatctgagccaaaaacctaggccaaaaatcctgactctcatttacattccacatttagataatcagaaaatacaaatatccagaatctggccacatctcaacaactttacctttactaccctggttcaggccgccattatctcttacctggactactgaagaagtaacctcctcactattcacctggcttccattcttgtcctgctacaatcccttctcaatgaagaacgagccgtttaaatcacacatcagaccataccattcctctgctcaaaaccctgcaatggtttcctgtttcactcagggtaaaagctaaaggtcctgccgtggtttatgaaggctctaagtgatctggttccctgccatccctctgatctcatctcctacttctttcaccatcttatccagctccagccacttaaacctccttactgtttctaaaacatcaaacacagtcacacatcagtttactctgactagaacgttctttccccagaaatctgcattgctcatttacttagctccttcacatctctactataagtcaccttattagacaggcctttcttgaccatcctacatataatatcacaaacatatctgtcattctgtatccctcttatcctgctttttcttcatagctgttatcagtacctgatatgctatagttttcgtttttttgtgtgtttttttcccgagacagtgtctcactctgtctcccaggctagagggcagtggcacgacctcggctcactgcaacctccgcctcctgggttcaagcaattctcctgcctcagcctccaaagtagctgggactacaggcatacgccactatgcccacctactttttgtatttttaatagaaaatgcgtttcactatgttggtcaggctggtcttgaactcctgactttgggtgatccacccgcctcagcctcccaaagtgctgggattacaggcgtgggccactgtgcccagctttttgtgtgtaatttactgtctttccccactacaaataggtacctaagagattggaactttgtttcattcactgttatgtatgagtgcctaaaacagtgtctgagcaggcactcaataaatatgaaataaattaatataccaaagcctttctgagggatttacacttgtactgctcaaaaatccataaacctcgcaaagagacaaaactggatcactagtggtaatatataaaaatgtaaaaataaaaatgtagtcttctaagaaagatagaaggcttgacagtaaatgattaactaccaaaagaataaagtataaatgagagattggcgaccatgtgaactcacctcaagagaataatagatacctacaaatgaacatgtgaaaaactttataataaaactatataattaagcacagagaataagactatcttgccaagatttgctaacttggcaaacatccatattaaactcagcttccccaattccagatacaaatgaaattgtgaatttggcaattcactggagagaaagactgcattacaatctaggttcacattaaagttacctcattcttctcaacttagatctgacgcagaggaaaatttttaacagattctattggacatatgccatactatagtcagtaaagttcaacattaacattttagatgttaacctaaatgatttgttttcctaaaactaaactgcactaaaaaaatatgcattatgagtataaaatgaattattttaaataatattttgtcaaagaaaaagcaatttataacaccagtccttccctcgtattttgatttcattcatgtagtgcctcacccacagctgaacacatggtagcactcaagctgttcactgataagagagagaatattctttccttcaaggtttattaaatatagatatgtccacctcaaccttcccagttattaaaaaatgcaaatgaaaattatgtaccccaaatttgtatataaatgtattaatcatttatttaataattagtatgtcataaagcgtagtattagatactgaagacacaaaataaaaattacacatgctgctatcaataacttcataatgtggtagagaagtcatataaactataacagaagatgataacttgtatggtcttggggcacacaagatgcaaaggaagcccagaagaaaagttcccaagatagaatgtgtagaaaaaagatgggagaaaatgcaggcataaagtaacacttagaagaaggcagaggtaaacctaacactacctacaaatgatagtatggctaaaggaaaggaaatatcacatgaataaagatgtatgcagagcccaaggtcttacatgacacccttaaaaatttggctattaatggggaggatcttaagtaagacagtaatatgagttgtgtttcatttaagatgatcaatctagcagcatcatgaagtttactttagagaggagattgagactgcagattattaaatcagttggtactgatccagaagaaggtagaacgatggcggtggcgttggctttgccagctcaggactgagtgcaagtaacagagaatcagccagattctccagaggctcttcaggttctcctctgtctttcagtcagcagtctcagtccatttgcggaggaacattggtgttacagcagtggcgtttaataaggaacttgatcctgtacagaaactctttatgtacaaggttagagaatacaaatctaagtgacagacatctggaggatctgttgatactgatccagagtaccagcaagagccagagaagaagctttttaagctcaagcaagtgtatggtaaagcagacatgaatacattccctaacttcaaatttgaagatcccaaacttgaagtcatcaaaaaaccccaggcctgaagaaataaagtaaaattaacctggtaagttgtcaagggttagctgtacaactagctagaagtttcagaataaacatacattcacaactgtcaaatgttcttttaatctcgattccaaataaattagttggtgatgtggagtattaaaaaaatctggaaggaaaaataaagatgtggacgaaaagaaggggatattacttgagagatattaagaaagttacagagatgggaactggtgaataatgaaaacttgaatcagcacagtggcagtggagctggacaggaaggagggaaggaaacatcaacaggacctggtgactgattaaaggcagaagattgggccaggcacagtggcctgtaatgccagcactttgggaggccaaggcaggcggatcacttgagtccaggagtttgagaacagcctgggcaacatggtgaaaccctgtctctaaaagaaaaaatatatatatatacaaaaattaaccaggggtggtggtgcatgcctgtagtcccagctactcgggaggctgaggtgggaggatcacttgaacccaggaagcggaggttccagtgagcggagatcgtgccactgcactctagtctgggtgacagagtgagaccctgtctcaaaataaaataaaaaataaaggcggaagattggacagagggaggatactcttggttaatggcaccaccatctaaccagttgtttcaaatacatagttggttcaaatataaagggagaaacaagcctgatgaaaaaacagtgaaaacaacttggagatattggatttgaattatctcaaaatagtaaagaaaattatataagcagattactagaaatatgtctagaattcaagacagagataaaagctggaggaaagccagggaatggagacagcagtgttctctactgctgtcttaaccctttctttcagagccacatataaaagcagttcactggcacctctgcttcctgggtccaagtgattctcccacctcagcctcccaagtagctgggactacaggcatgcgtttttatactattttgagagaattcaaatgcaatatccccaggttattttcactgttttttcattctcccaaaggaaaactgtttgtctcctaaatcaaggagcacgtgagcctgtaaagttccatagcagagaggaaataagtgatgggtaggagaaaaaaaaacaagaagaaagaggcatacccttctataatactacagccagaaaagggtaaaatgaggccccaaagttcaggcatatgtatatggccatttaactaggactttttaagcaataagcatgctgtgcttaggctgtctcagcactattgttaaatgctttaattatgtaacttttgatacattcatgttatcatatgttgtaattattgttgttactattacattttctctatatagcacttattatgtatggggcaatgtactaagtagctttacaaaaattatttcttttaatcctcaccaaaaccctatgaggaagtatttctccattttatatatgagaaaactgagggatagaaaggttaaataacttgccctcaaatactcagcaaataaaggacagagttgaaaatggaacccaggcagtctagctccaaagtccatgatcttaatcatcaagttatactacctcttttcaggtggataaagaatacttttggttactaacttaatctgaagacaactattttctagtaggaaatatttctaattttacaatacatgtaggagaaaattgagtttactgatcagaaacttgctagactacattattaagtaaaaaaacacacagaattaaaatattatttaaaacatctgtacatttttaatctgtataaacatgtatatataacaatagttctcatctatataaatatgtacatataataattgttcttaaattttactatgcatcagaatttcttggtgggcttgttaaatgcagattgctgaacccctacttcaaaccccaatctttcccctattacttacgaaataaagtacaacttcttttcagcatggcttacctttggccatgaggcatcgtctaaccatctttcaataagtttttagtacattacctatttttttatgctttccctaatacaacccttcctaataaagccatacattccttctatgattccaaagcacctctaaaatagtaaaaaacagaacaatgataataatatcaattaactctgtggggcattcccaaggaaacatgaattacctcattcaatcctcataacaactcctcaggataaagattataattattctcactgtacatatgggaaaaaagtgagacatggagaggttaaattgggcatggtaatacaatcagcaagtagaaaagctaggattctaccactgcaattatactatataagcaattactagattgttcagtacttggatactatttagatactagatttttctaagtactaatgtaaataatttccttattcatttttacacttatttaactgacatttactgactgcctatcatatgccaggcattgtgttaggcacgaaagactatcatgttaaaatacaagggaagacccagtacctgctctcttgagacatggaatccagtggaaaaaccaaacattaaattaaaaatcagagaaatatttcaagaaatatgtgttaaagacaaaaagtacaaggcactccaagattataataggaagatctaagctgtttatagttattgtactggcagtgtcctattacaagagtataagttacacagaatttgcatttcaggatgccaaataattccatttcaaaatgacgctttcaaaatcaaattaattaattataagaccaaagtcatatagttaaaatttaaaacatattatttaaaatgaaatttaaatatgtcagctctttatttttccccttagcaaatggagctattacgcatctgacacagaatgtaataaatataaactatccaaaactaataaaatagcatttgaaaatgtccttgcaatattggtcatgataaaggtaaaataatatgccaagttcctgacaatcctagtagtgcataaagtacttccattttggacaatgctaactttcttatgattgaattagatccatgacttaatatacatcatttgtaagattttttttttttttttttacaaaaagcagacttctttcataataaatttcaaaatgaaaaccaatgtttttttacagaggaaaaatgcctaaaagtccaaatactgatcttacaaagagacatgaaaggtaaaatcaagtatgaaccaggcctggattcccacatcttcagtttctatttatcaaacagaaaaatctttccaactttctcctttcctgtataagaccaaaactatgcaatattctgtttgtattacaattacactaattcaatgcaggtcacttgctttttactgagtccagatgacattcagtaaactaaacatgggccaattagtttaaaaaaaagaggaagaaaagaaaaaaggaagaaacgagtgagttctgattgcctttgggtaggtcatacagtggctacagagcatcacagcctgaacttcattttggctaacaccaaccatacggctaacattaaggactagcattttttattcctttcagatttctcacatttggaaattccaatttaaataattttctggtgaaagtgaggacagcactcctgcataatatcagttttcccctaattcaactccaatgtcttattttggagctactaaaatggaatctgcacaatgtctaaaaaagtataataatcctttttaaccaatttttttatgtattacagttttaaatgagcaaatgaaactgataatttagctgacacaaacccacacaaaaaaagatggtctaaagctatgaagtttcaacatcaatgtttgtaatctcaaatcaacctgaaccaccatacaattaggtatatgacaaactaagtaatagaaatattcataactaaaagcaatattatttttaaatatcttattaggtgttggcacccaacattttcttataatctatcatgtaaagaaatctgttttactattccttttaaactctctactcatgctactttaggtgtgtttctagaaataaatactaaactctctgctaattttttttggctaagaaattttttgaaagttataatgtaactaagttaaaatgtacatataatcataatttgatatcaagactgctttcatacaaaaaacctacattaattaattccttaagtaaatttacactttatcaattgttggtattttaaaaagtactcaaaagaaactcttcattcaccattattacaaaaatggaagtctccaaatatgtaaactagcttgatttttaaatttgttacttatttagcctaatttttttaaacttgcctaaatttaactgaagaatattatgttcctgcaagtgttcatgaatacaaagatacagtaatgaagatggaaattatttactctaacaattctgactgcatgactgttaaatcacttacatacggccaaatgatctacaaggaagcagggaggtcctgaaattgtgtactcatatccattttcaactactgcacaggtgacacaaccaatcaaggcattactgaaacagaatgggaatagaaaggacttagtgaataaaagtgacttctttagacaaaaatgtagaggttagcttgtgaccaaggtggaagaaacagcagcaccattcctcccattgcttgttcatattaagagaaaactgagaccactaagaggcaaaggacagaggacagcaacaccagcaaagagacaggcagcagtggggtcagagcatgagaacagtattaagagttaaacatagagcacagagggggtggtttaaaatgtcagttttactcaattatttataggacagttcttggaaataatgttacaatgaaatgttggttatataaaaatcttatttaatgtagtaattactatttagacaagggcaaatatagtaaatattaagtaaaaattaacaataattaaaatgggcttatggtctgaaatagacatattatgggaaaggattactgttctaacaactacgcataaagctgtgaaaaggcaatagttatactagtctgtagaaacagtactctaaaagttacaataaggagatacacttttttttttttttttttgagcaaggtcttattctgtcacccacactggaacacagtggcatgatcacagctcactgcagtctcaacctcctgggctcaaccgatcctctcacctcaggttcctgagtagctgggactacaggcgcatgccaccacacccagctaattgtttttgtatgttttgtagagacagggttttgtcatgttgcccaggctggtatgaaattcctgggctcaagcaatccacccacctcagcctcccaaagtgctgggattataggcatgaggcaccatgcctggtccaatatggatattaatcctcctgaaatagatgggattttaaaatgcaatactcagtttcaatgttgaaatgtgctcttctttcactgaaaatgacatgacactgtgaaagctttcttctaacacaggaatttttagaccttcacacaagttttcataatgtttaatactttcaataagcttcatgactattaatgctttggggaaaacttactttttgtttctttatttgcttttcaaaaccaaaggcatatagtaataattcattatgcttttacaatcaggtttcatctgatgtcaatgttacctttcatatctttttaagtgtttttccatgttaacgtgaaggtgtgtttcttaacttcacatagcaagaaacaaagacacgcctttgttcaatttaaatattttggttcctggccaggcgcggtggctcacgcctgtaatcccagcactttggaaggcttaggcagatggatcacctgaggtcaggagttcaagactagcctggccaacatggtgaaaccccatctttactaaaaatacaaaaattagttgggagtggtggtgtatgcctgcaatcccagctgcttgagaggctgttatttgttatatgttattccatattccctattctattctattctattctactcattcagagacaggatctcaccccatcacccaggctggagtgcagtggcgcgatcacggctcactgcagtcttgacctcctggactcaagtgattctcccacctcagtctcccaagtagctgggactacaggcacaagccactatgccaggctaatttttgtactgtagacacggggtttcaccatgttgtccaggctggtctagaactcctgagctcaagtgatctgcctgccttggcctcccaaagtgctgggaatacaggcttgagcaactgtgcctgacctccatattcattttattcaaaagaattttatacacaaaattgtggcaaaacttcaaggaagaatatattcttttgtagttctgtaatctagtggaaaaatgtgatataaaaaaacataaaagttaatgatatactagtgaagggttcctaatattcaattaactttgattttattctcaatctattttatactaccattcttcttatgaaaatatcttcaacactttcattgtaccaataaacaacaatacaataattaacaatttgcatttattattaaagtattaaatttaaaactccaaagcacctacttgaaaggaacattccaatataatttaattattcttggtcatttgctcatgtttccttaaatataaatacagtatacctaacaaataataagcataattataaatattatcacattttacaattttttattctaataaagaaaacatatgctcaaataatggaatttaactataaaatctaatttttagctcattgaaaaaacataaaaaaggatgatcaaactatttaccagtcttaaatatttaagagtataatatgtttatactactatatttatatgttataaatacagactatatattaacacatttataactatagtaatatgtatttatatagtataaaaatatactactatatataatactggctttttaaatacatttcctaatttcctttatttactactttaactttgtagtttataatttacaaatttcccagcactatatcttccccacaagaagatttccctttctagtggctactaacatacaatgtttaaggattaattaatgatagattggttaatgaatctgcaaaatatttagctcttttatttccatttttctctcctgctaattgacttttgaccatgttagtgtttattaagctcaagatccaaattagctaaattcttgccctcccaaacaggaggcagtctaaagcaaaggtgttggttgactgcaagttctggtggaatttacctattaatcagttctacaccattttgtcaaatctgaaccaatatagtgccaaaagaacattcttaaatattaagacttttatctttggcatacaggattcattcatccaacaaatacatactgagtaactactatgggccaagcactgttctagtgcttaacatatattagtgaacaaaagaaataagaaattcctgccctcatgttgccaatttaccaaccctgtgctgtgctccacactaaaaatacaaaattgaagatactaccccttacttaaagaagatttaatctaatcaaaggcaagaaaaatgtcctcaatgcaacttatcatataatgctaaaatatgcatatgtaaatggtagcagaagcatatataaagtgccatgaagagtagaggggaagaagcctctgtgcagatgttactgagtacaacatcacaaggagtataattctctctgcctataacaatcaaacacaggcattccaacctgagaacagatatgcccaatacagctttatatctaactctatgttgtctttcttagaggtaaatcaaggtgctgctttacagaccttcataattaatgtccccttagcatcttcaagagttaatggaaaaggagggaaaattctaatcactacatgttgacactttttagtagccaagaaaagttctcaaagaatgacaatttaaaaaattaacttgtatacactttctaggttaaccgtgggcctcaataatccctaccattccaatacacaaatgtcacaagttctcattcatatgtgagagctcaaaccagtggatctcatgacatatggagtacacttgccatcaccagaggccaggaaggggagcggggagggaggagtgaaatggagggaaaagggaaataaatgtatttattggcactgagctgtacacttaacaatggtaaagatggttaatttttaaaatattttcaataataatattaataattatccttaccatccttatctcttattcacatgaagacattagttaccatttattaagtgcctccagcaggagaggcactgtgtacaccctttatataacattatttctaaggcttaaacctttagaagattagtatttttattacccagtttttcacatgtgaagactgagagtgggagagattgtataatttgcccaaggttgtacaccatttggcctggaatgtaaaagaaatccatacgaacacaaagtcaaggatcttttcactctacctgatagctgcccactcccataaagaatctaatattgagggatattaattcctcttctatgattatttttaaccatcctatatgtagataaatatgtaaactgatctaaaacagtttacatccttgttgaaaacaggatcacatatgattacctagcctgctaacccagacaggcagatggatggacaggcagatggaagaatgaacaaaatctcaagtataatgacatccaaactgtttaaatctactgcacagtgttcttataaatcttcaatggcaagtccatttgactgacactatttctaaaagaacaattaggctaggcacagtggcccatgtctgtaatctcagcattttgggagggcaaggcagaaagatcacttgagcccaggagtttgggaccagcttgagcaacatagtgagaccctcacctctacaaaaatatttaaaaattagctgggtgtggtggcacacacacctgtcgtctcagctactccagaggctgaggtggaaggatcacttgagcctgggagatcaaggctgcagtgagacatgattgctctccactgccctccagcctgggcgacagagagctcaaaaaataaaatacaataaatgaaagcacaattaaacaaaaaataaacttaccttgagatctttgtaacacctttattatccctattattacctcatcttctattaatgtccttctggctcactccagccacactggcctctggttaagaatcaaagagccaagcatgttcccatctcacacagactttgtactgtctgttccctccaatcaaggcagtcttaccccagatggctcactcccttgtgtgcttcagtctttagcttagatatctccttcttaacaaggcatccttgactaccatttaaaagtacaatcagaccttcatactccctaatcaccatccaatgatatattttatgtatgtgttatatttattatgtctaacccaaccagaatataaacacaatgaaggcaggaatttttgttttactcaaggctatatatcctgcccatagaaaagtggctgatgcacaacaaatatttgttgaatgaataaatgaactttgtgaccaggcacagtggctcatgtgtataatctcagcactctgggaggccaaaggaaggatagcttgtgcctagaagtttgagaccagcctgggcaacatactgagacttcacctctacaaaaaacttaaaaattagctgggtgtgatggcatgcacctgtagtcccagctactcaggtcaatgtgggctgaagtgggaaaatctcctgagctcagatatttgaggctgtagttactatgatcacaccactgcactccagcataggcaacagacaaagaccccaactcaacaataataataacaaccacaataataataatactaaatgaacttcattatttggaacctaaagaggaattgtataagttcaatttcatcactgataaataattcaattaaagacttcttttaaagccaagttttatattatttagcactactgaacttccccttcttataaaatgtttgcctccttactctggccaaaaatcttcttttcattgctctttagaagtttaacatgatgaaaatcagtgtttgactttaaaagtcaaagtatgaatgaaaccgaacttgtatagacacatcttttagctctcatttcaataaactgttattaaatccataatcttttgagagagcaactcacagattaaaaattaaaattaatattttatctgatgctttacggcatccattgtattgaatgcatttgtttaatatttctaagtctttagaaaagcttctgagaaaattgatttccttatgttgtttacagtctgtgaccaaatatttttaggacattcacatgaataaagggtcccaaatgcaacagaaattataatcacatcataacttaagctttaaattattcatgtcttttatgtttaacaaaaaaactattatccaaaactatttattatattaaaatatttttactcaacaatctttttctcctaaggtcaatgaaggcatatgactcctccccaattatataactttttattattttaattaaattaactgataccagcatgttttaatatcatccctacacatttagaagaagtaaataacctagagatcaaaatacacagtaaacccatacaaacagcagtttttcattgccatctctctatatataaacattgaatgcaattctatgaaagtatggctccacgtattcagatgaggaatatgtctgtttacatgtgtctctttcccggtccacattacagggggacctgtgtgtgcctccgtggttaagatttactgcatgttcacattaaagtctcatttccaacatttaaacatgcagccacaaagaccaattagaacagttattagtacaacccttggtgtaccaaagatttgggagttcataaagttgaaattgattgtttatggacaattacaggtaccaaaatgatttaaaacatttcaatttttgctctgctgaacgagactcatttaaacagcagaactagaagcagagacttaaatatcaacttgtaatcaaaaatcaccagtaatgtcttagcagcgtgttcatcctcctactcagtagagtccttaaacatacagggactccaatattagcttcaaaacattttcagaatgtctagcaaaaatatgtcaaacctggatctctgacttaaaggaacacacaaggcctaagaaataattgctgtctcaaatactgtggagttaataaggttttaaagtatataaagttgctataggctaaacggcacattttatattagacaccctttcttgctaaacactgtattatatattaaactgtagcaaaagtgaatgaatctatgaggaaaatcaaaatgaaattttcaagtactcacataatgacatacctctaaactgtgaggtactttatgacagagtgtgtgattcattcatcttttaattcctagtgcttgaatacaaagttgatattcagtaaacactgattgaatagaaaaatgagtaaatacaacttgaagaataactatgtaatgagatttctgattttacaaaacactttcactacttttctaattatatatatatacatatatagatatagatacagatatagatagatatagatacagatatagatatcgagtagagacagggttttgccatgttgctggtctagaattcctgagctcaagcaatccacccacctcgaactcccaaagtgttgggattacaggcgtgagctatcatgcccagtcgtgcttcaccacttttcaatgtcaacttcaagaaaatgaaaattgcacctttctgaacaaactttaagtctaccctaaactgctaagaatcaacactaagagcagatgacataatgtgtgggaaaataaaaagtcagccagccagctggacatcagtctcttctctgactgctatgactaaactcttcaaggttataacttttcaaatgctaccactgtaatgaactatttcattgctagtgttacctcctttccttggtcttcccctttctagacaagaattcctgttattatctcattcccttcttgactgcactttacacactggtttcaatttgtacttgacctagttcccagaaaacacccagttttccttttctcacttagtatcttaatatttgtaatattaataacccacttatctattcaattgtttaattgtattttatctattatctattcaattgtttatttctatttaattgtagtaactctattcagagctagcctatgcaaaagagaagacagcagtcttcagatgtgacttacttagtacagaaagatcccaaccctaatatatacaaacacatacacatgcaaacacacacacctgctataaaccaaaattagagatacatttctttgtgttaaactcctgcttcttgaggttcttattctccctctgtccctctcaattgttctgtcactctttacctcctgcttttttctgttttacagtaattctctccagctaacttcactcttctttcttctacatacaacatccaatgtgtccaaaaaaattctgtgggtttttgtttcaaaatatatccaaaacctgattaggtcttaccacctccactgttaccaacctaacacatgccacgatcatctctcacttggattactgcagaggcctcccaactggcctctttccttctatctttgcccaccccgcccccacaatctgttctcaacaaaacctaagtaatcctttaaaaatgtaaatcagatcttatcactctgctgctcaaggcctgccaggggtctgtctacaaggcactactgatctcacctacctccatcacctcccttacttcctgtctttctctgacattatctcctacttctttgtccctagatcactctgctcccttctgcctctccaaacacaaaagggctttccattgaccattccatctgcccaaaatgatctccccaggtatatgtgtggtttactcccacaatacctgcaagcctctactcaaatatcaccttcccaaggaggctctgaacaccatatttaaaatcacaaatttgtccaccaaaactccctgtatccttcttagtgtacactctagttttctttaatcatttccaaaacacttatggctttctcatattctatataaattacttattatatattgttttatatctattgcctccttctaggatgtaatctctgatatatcccaaatgcctagaaaggtatctggcagagtagacaccgaataaaaatttgaatacatgaaaatatactagactatcttaaaatacaataaatatatagtatgttctttttgtttgttttttgagacagggtctcattctgttactcaggctggactgcagtggcacgatctcggctcactgcaacctcagcctctcagggtccacaggcaggtgccaccacgcccagataatttctgtatttctttgtagagacacagtatgccatgtttccaaggctggtgttgaattccttgatacaagcaatcctcccacctaggcctcctgagtagctgggattgtaggcatgagccattgcacccagccttgatgtcattatctaatgtctcctccttaataaattgttaataacccttaataaattgtggctaacataccttttacaatacaactctagaccattaatgtgtcccataaatcctgtgtgcatcaggaggtatcttttttgcctcaatgccttttattaatgcactgtcagtattctacttgggctttattcaaatacaagcctataaaactactgaatctttttccatccctcctactttcccattcttgatttttcccctacctttctctacaactccaggtgaccagcaatgacaacctaatatgtatcactccataccttcttctccatccttaaataaccacgtacaaacatatgtagagatttaaaattctattttgtttctttgggaatgaagttgtccccatatatgctccttcacatcttatttttctcatctcatagcaaacagtggaatataactacattaattggtatacacagaactccattctttttaatggccgcatgttacaaggccaaaatgtatcaaatgtattcaacttttcccaccttgtttccagttttttaccactaataaaaatactgcaaaaagatccttgctttgaaaaatgcatatatccttacatatttatgcttttatttttatgagataaattctaggggtaaaactgccaaaactgctttccaagaaaagaagtaaatgtcacatttctaccacaaatgccttttgctctaatttgccaccaatattgagtggagccataacatttttaattttggatatatgatgatatctcagccaggcacagtggctcaagcctgtaatccctgtacttcgggaagccaaggcagatgaatcacttgagatcaggagttcaagccagtctggccaatatggtgaaaccccatctctactaaaaatacaaaaataagccggctgtggtggcacccacctgtagtcccagctactcgggaggctgaggcaggagaatcacttgaacctggaggcggaagttgcagtgagccaagattgtgccacagcactccagcctgggtgacagagcaagactccgtctcaaaaaaaaaaaaaaaattagcccgggcatggtggcgggcacctgtaatcccagctacttgggaggctgaggaaggaaaatcacttgaagccaggaggcagatgttgcagtgagccaagattgtgcactgcactccagcctgggcaacaagagcaagactctgtctcaaaaaaaaaaaaaaaaactcaatgttactttaatctgcatatcctaaagtactattaatcatcttcctatgtgtcattagtctattgggatttgcatttctgtcaactattcatctctctccctgttttttatactggattgtcttttgacactaatttgtagttttttttaatatcgtagatatcaaccatttatctgtaatttgaagtataaatatttttcccaacctaccgcttatctattgagtttgctgccaatgagatcccacatataagttacaaaaaaaatcattatatgattagatttatttttctttcatagctcctgcatttcctatgttggttagaaacttctcccaagtttctaattcatgcatatagtccagaattcatattcttccatgtaagtctctagtatacttagaatttatttaggtattgtaagagaccaaagattcaattttctttcagatgaacagataattccaaatgcatgattatcattttcccattgagctcaaattttcacatttatcatattaaattcccaacagactattgtaattacagtagctttagaatttattttaatatctggtaaagctattcatttctcacttttttctccataattttcttagtcaacaagtatgaacattatgttacccaattccaatgtaaaccataaaggaattttaactagaactgcaattaacttttaaacaatttttggtaaaagattattatgatatagtttttgcatggcaacacaatattataagaattgggaacatatttttaaagccagcatgctctttccttcatttcaattccagtgtaatgtctttcaattagatttttacgaatttcttcctacagaagtgtacttcttttgttaactttattcctaaggattttctagtttttgaaactacttttaattgattactttttccaatttttctttaataacattattatcagcactgagaaaggctaccaatttctgtgtattttatatacaactattcaccaaattatgttattaagtctgataatattttactggtaccttttggatatcataagcatacaatcatatcagcaaaataaaatgtatttttcctcttcttttctaatgttcatacagattatttcattttttacctcattcaacatgctagaacaaaactaaataacgataatgataataatgataatagaggacatacttgttattagaaataacattagcattccactgtttaaaatgtttacttttgaagaatggcccggagggcagccaagatgaccgaataggaacaactctggtctacagctctcagcgtgagcgacacagaagatgggtgatttctacatttccatctgaggtaccgggttcacctcactagggagtgccagacagtgggcgcaggacagggggtgcagcgcaccatgcgcgagccaaagcagggagaggtattgcctcactcgggaagcgcaaggggtcagggagtccctttcctagtcaaagaaaggggtgacagagggcacctggaaaagcgggtcactcccaccctaatactgtgcttttccgacgggcttaaaaaacagcgcaccaggagattatatcccgcccatggctcggagggtcctacgcccacggagtctcgctgattgctaggacagcagtctgagatcaaactgcaaggtggcagcgaggctgggggaggggcgcctgccattgcccaggcttgcttaggtaaacaaagcagccaggaagctccaactgggtagcacccaccacagctcaaggaggcctgcctgcctctgtaggctgcacctctggaggaagggcacagacaaacaaaaagacagcagtaacctctgcagacttaaatgtccctgtctgaacagctttgaagacagcagtggttctcccagcacgcagctggagatctgagaacgggcagactgcctcctcaagtgggtccctgacccctggccctggagccgcctaactgggaggcacccccaagtaggggcagactgacacctcacacggccgggtactcctctgagacaaaacttccagaggaacgatcagacagcagcattcgcggtcacgaaaatctgctgttctgcagccaccgctgctggtacccaggcaaaccgagtctggagtggacctctagcaaactccaacacacctgcagctgagggtcctgtctgtaggaaggaaaactaacaaacagaaaggacatccacaccaaaaacccatctctacatcaccatcatcaaagaccaaaagtagataaaaccacaaagatgggggaaaacagagcagaaaaactggaaactctaaaaagcagagtgcctatcctcctccaaaggaatgcagctcctcaccagcaacggaacaaagctggacggagaatgactttgacgagttgagagaagaaggcttcagacgatcaaactactctgagctacaggaggaaattcaaaccaaaggcaaagaagttgaaaactttcaaaaaaatttagacgaatgtataactagaataaccaatatagagaagtgcttaaaggagctgatggagctgaaagccaaggctcgagaactacgtgaagaatgcagaagcctcaggagctgatgtgatcaactggaagaaagggtatcagtgatggaagatgaaatgaagcgagaagggaagtttagagaaaaaagaatgaaaagaaatgaacaaagcctccaagaaatatgggactatgtgaaaagaccagatctacgtctgattggtgtacctgaaagtgacagggagaatggaaccaagttggaaaacactctgcaggatattatccaggagaacttccccaatctagcaaggcaggccaacattcagattcaggaaatacagagaacgccacaaagatactcctcgagaagagcaactccaagacacataattgtcagattcaccaaagttgaaatgaaggaaaaaatgttaagggcagccagagagaaaggtcaagttacccacaaagggaagcccctcagaccaacagcggatctctcggcaaaactctacaagccagaagacagtgggggccaatattcaagattattaaagaaaagaattttcaaaccagaatttcatatccagccaaactaagcttcataagtgaaggagaaataaaatcctttacagaaaagcaaatgctgagagattttgtcaccaccaggcctgccctaaaagagctcctgaaggaagcactaaacatggaaaggaacaaccggtaccagccactacaaaatcatgccgaattgtaaagaccaccaatgctaggaagaaactgcatcaactaacgagcaaaataaccagctaacatcatcatgacaggatcaaattcacacataacaatattaactttaaatgtaaatggactaaatgctccaattaaaagacacagactggcaaattggataaagagtcaagacccatcagtgtgctgtattcaggaaacccatctcacgtgcagagacacacataggctcaaaataaaaggatggaggaagatctaccaagcaaatggaaaacaaaaaaaggcaggggttgcaatcctagtctctgataaaacagactttaaaccaacaaagattaaaagagacaaagaaggccattacataatggtaaagggatcaattcaacaagaagagctaactatcctaaatatatatgcacccaatacaggagcacccagattcataaagcaagtcctgagtgacctacaaagagacttagactcccacacaataataatgggagactttaacactccactgtcaacattagacagatcaaccagacagaaagttaataagcatacccaggaactgaactcagctctgcaccaagcggaactaatagacatctacagaactctccaccccaaatcaacagaatatacatttctttcagcaccacaccacacctattccaaaactgaccacatagctggaagtaaagctctcctcagcaaatgtaaaagaacacaaattataacaaactgtctctcagaccacagtgcaatcaaactagaactcaggattaagacactcactcaaaaccgctcaactacatggaaactgaacaacctgctcctgaatgactactgggtacataacgaaatgaaggcagaaataaagacgtgctttgaaaccaatgagaacaaagacacaacataccagattctttgggacacattcaaagcagtgtgtagagggaaatttatagcactaaatacccaaaagagaaagcaggaaagatccaaaattgacaccctaatatcacaattaaaagaactagaaaagcaagagcaaacacattcaaaagctagcagaagggaagaaataactaaaatcagagcagaactgaaggaaatagagacacaaaaaacccttcaaaaaattaatgaattcaggagctggttttttgaaaggatcaacaaaattgatagaccactagcaagactaataaagaagaaaagagagaagaatcaaatagaagcaataaaaaatgataaaggggatatcacgaccgatcccacagaaatacaaactaccatcagagaatactataaacacctctgtgcaaataaactagaaaatctagaagaaatggataaattcctcgacacatacaccctcccaagactaaaccaggaagaagttgaatctctgaatagaacaataacaggctctgaaattgaggcaataattaatagcttaccaaccaaaaaaactccaggaccagaaggattcacagcctaattctaccagaggtacaaggaggaactggtaccattccttctgaaactattccaatcaatagaaaaagagggaatcctccctaactcattttatgaggccagcatcatcctgataccaaagcctgacagagacacaaccaaaaaagagaattttagaccaatatccttgatgaacattgatgcaaaaatcctcaataaaatactgacaaaccgcatccagcagcacatcaaaaagcttatccaccatgatcaagttggattcatccctgggatgcaaggctggttcgatatacagaaatcaataaatgtaatccagcacagaaacagaaccaaagacaaaaaccacatgattatctcaatagatgcagaaaaggcctttgacaaaattcaacaatccttcatgctaaaaactctcaataagttaggtattgatgggacgtatgtcaaaataataagagctatctatgacaaacccacagccaatatcatactgaatgggcaaaaactggaagcattccctttgaaaactggcacaagacagggatgccctctctcaccactcctattcaacatagtgttggaagttctggccagggcaattaggcaggagaaggaaatcaagggtattcaattaggaaaagaggaaggcaaattgtccctgtttgcagatgacatgattggatatctagaaaaccccattgtgttagcccaaaatctccttaagctgataagcaacttcagcaaagtctcaggatacaaaatcaatgtgcaaaaatcacaagcattcttatacaccaataacagacaaacagagagccaaatcatgagtgaactcccattcacaattgcttcaaagagaataaaatacctaggaatccaaattaaaagggacgtgaaggacctcttcaaggagaactacaaaccactgctcaatgaaataaaagaggatacaaacaaatgcaagaacattccatgctcatgggtaggaagaatcaatatcgtgaaaatggccatactgcccaaggtagtttatagattcaatgccatccccatcaagctaccagtgactttcttcacagaattggaaaaaagtactttaaagttcatatggaaaaaaaaaagagcccgcattgccaagtcaatcctaagccaaaagaacaaagctggaggcatcacactacctgacttcaaactatactacaaggctacagtaaccaaaacagcatggtactggtaccaaaacagagatatagatcaatggaacagaacagagccctcagaaataacgccgcatacctacaactatctgatctttgacaaacctgacaaaaacaagcaatggggaaaggatcccctatttaataaacggtgctgggaaaactggctagcgacatgtagaaagctgaaactggatcccttccttacaccttatacaaaaattaattcaagatggattaaagacttacatgttagacctaaaaccagaaaaaccctagaagaaaacctaggcattaccattcaggacataggcatgggcaaggacttcatgtctaaaatgccaaaagcaatggcaacgaaagccaaaattgacaaatgggatctaattaaactaaagagcttctgcacagcaaaagaaactaccatcagagtgaacaggcaacctacaacatgggagaaaattttcgcaacctactcatctgacaaagggctaatatccagaatctataatgaactcaaacaaatttacaagaaaaaaacaaacaaccccatcaaaaagtgggcgaaggacatgaacagacacttctcaaaagaagacatttatgcagccaaaaaacacatgaaaaaatgctcaccatcactggccatcagagaaatgcaaatcaaaaccacaatgagacaccatctcacaccagttagaatggcgatcattaaaaagtcaggaaacaacaggtgctggagaggatgtggagaaataggaacacttttgcactgttggtgggaatgtaaatgagttcaaccattgtggaagtcagtgtggcgattcctcagggatctagaactagaaataccattgacccagctatcccattactgggtatatacccaaaggactataaatcatgttgctataaagacacatgcacacgtatgtttattgtggcactattcacaatagcaaagacttggaaccaacctaaatgtccaacaatgatagactggattaagaaaatgtggcacatatacaccatggaatgatatgcagccataaaaaatgatgagttcatgtcctttgtagggacatggatgaaattggaaatcatcattctcagtaaactatcgcaaggacaaaaaaccaaacactgcatgttctcactcataggtgggaattgaacaatgagaacacatggacacaggaaggggaacatcacactctggggactgttgtggggtgggaggtggggggagggatagcattaggagatatacctaatgctaaatgacgagttaatgggtgcagcacaccagcatggcacgtgtatacatatgtaactaacctgcacattgtgcacatgtaccctaaaacttaaagtataataaaaaaaaaagtttccttttttatatactttatatttatgtactcaagaaaggctgttgaattttattcaattttttcagcatccattatcatcatctaattttccttcttcaatttgatacaccctacttgatattctttaatttatgcagaattattttcagttaaaggctattaattagtgcgtcctttttatttcaaaaattcttatttagtatgcttccagtcactctatcattatccattgggatttggtaatatatatagaaagatttattgtttataactgtttcttcttcataatctttcaaggcctcaattctgattcatttgctgtttggttatagttagttcaagtattttcctcaaatgaagcaaatgagagttatattctgtcaatctctgaatatctaaacatatctttactctgaaaggtggatgaaatactggttgagtcactcattcatttattatttaataagaattactctacgtaatacagatggatacaaaatgacaaaaaactccctgcctttaaagaatacatatattccagcagacaaagacagacaataagcacataaatgaatcaattaattaaatataaaatggttagaagagctaagaaaaaataaggcaaggaaaggaaaatcttctataatatatacataacagtcaagaccgacctctgattttgacaataatggccattcacccatatatagtgctttctaagtgccaggtactgtggtaagtactggacacacatcaaatcattcaatcacaaacaacccttcgagatagttactatgaaaataaaaatgctataactggtgaaactgaggcacaaacaagttgatttaccaaaggtaaaacagcaaataagtagtagaaccaagctgtccagctcttaaccattatgttttcttgcttctctgataatatgccatttcagtagataatgaaaggaaatgagggcaggagagagacccatagggttatatggaagaatagaattcctagcgaaaagaaaagccaccacaaatcttataaacgccatgaaaaatagatataaatacattaaaatatttgtattataatcttagactcaaccttaaaatatgtggctgaaacaattcctcacatgtatagagaaatgtttaggttatattaccttatcactcaagaattgatcagataaagtactcaggattaaaatgcaaaaaagcaaaaaaaagagtattaagagtatcttaatgtgatttcttaaaatttatttctaaaactaaatgctagaattatataaagtgaagaaacacagacacattctcaataaaaatggaaataaaactagaataacagtctacctaccacccctatgtaccaatactgtaatggatcctttacacacaatttctcatttagtccttacaataagcctgtgattccaataaatctattgtgtccatttaatatataaagaaagtaaaatttaggagaatcagtatattgccctaaagtcacataataggaaaagtgggaagaaataaaatacaaatttgtaaaacatcactgtataccttaaacatataaaatctttatatgtcagtatatctcaataaagctgctgaacatatgaatttgtatgatggcatgagcacagactattagatccaagaaaatcaattgtctatggtaaataagttcagcaaaattataggatatatggtaaatccaaaaaagtaattccctattgaagctggactgtgcggtagagaaaaaaaatgagctttggagcaaaatatgcttgattcaggtcaggcagagaaggctatggagttaactgaagagggagtgctgctgagattagtacctgcagggtcatgcttgcaataaccctagtggatgcaccagtgacaaagttgctcagcaacaacagcaaactaaagcaaacatatctgttcctagttctgagagatcaaaaggcaaccaacccaaactatgtaagaagttaagaaccttactccctttcagccctcattctcttctcttctcaatactactacttttacctcctgttaactacctcatttttctttctttccttgctctttgactctttcttgctgacgcttcccttctaggtctcttttttcctttcaatcaccccctattgaactgctttcttccctctcaccaccagtttggtttcaagaggattcttaaataacttcattacctccaaatacattttgatctcaaaggtcatagctcttcttccaatattagtaatttaagaattactaatgagacaaatccacaggttaacatgaaacaattccacatgtcacagagttaaaaaatgggtcaaacacactgacctgtttatgttaaaatattatatggctttagaaaaaaattatgccctaaatacaacatgcgctgcattaacaactgcattaacaacattttagtcctttagatatgcaaatacttattgtgttacaattgcctacagtattcagtacagtaacatgctgtaaaggtttgtaatctaggagcaataggctataccatataccctaggtgtacagacagctatattatctaggtttgtataagttcactctatgatattcttcacagatttctcagaatgtatttccatcattaagcaatgcatgactgtattaaaaattctttcatacaatttttcattatttttgcaaaattcaaggagtaatatatcacttatttaacaaatgttaacaggatatttcagaagattggtgtcaaaaagaaactcagttattgctttaatgtctctcagcaccaaatttcttttccatttggacttaataacaccttacatatacaaatgattcacaaaagacaagtcctctacagtttactatcatgagactcagaaaccagtatcacacaatgcttttaattcttatcatattactaaaattttatcagaaacagatgtcagcaatacaattttgatggaattacttaactttttttttttttactttcataacaaattaagcattgctcagttgaaaagttataatgtcacaagccttgaggcagcattaggtgctataatttgaaccgatgcagtgtagagtttgcatgctagtagaaaagaatttattagctacattgttgataattatttaactagcaaactccaagttttcttaaaaacacttccaatcaattaaatatctaagaaaactaataaaataactcaaagttttctagatgtataattaacatagcaatacataagttagcaatatagctgcaaaacaggtggaaaatataaccattaaaatgacttccatcctttcggtaggaagtagcttaaaaaaacaaataaaaataaaaacaaaaacaaaaaataaaatgacttccaaagaacaaaccaggcaaatggtttatgtccctaaataagctgaagcctagagataaagaaatttagtgggtaaaaaggaaagataatctatactaaaaacaaaaccaaaaaatgaacgaagacgatgaatggataaacaaaacgtggtataaacatataattgaatattatttagccttaaaaaggaagaaaatcacatgctaaatacagatgaagcttaaggacattatgctaagtgaaataagcccattgcaaaaagaaaaatactctatgattacacttacaggaagtatctaaagtagttaaattatcatagagacagaaagtagaatggtagttaccaagggctggagggaggaagcaatggggagtggttacttaatgggtaagagttgcagttgtgctagatgaaaaaatcctgcagatctgctgtacaacaatctgaatacatttaacgctactgaactgtgcactgaaaaacagttaagatggtaaatttttttaaccacaattaaaaataagagctttttaaaagaatgtaaagtaaaaatggaagatctgtgcacaatttttcttacgggcaaagaaatggtacatcttacaggtaaaacatgtatgttatgtgttacaactttagggaagccaaaggttttaatatctgatgccccatgaatgtgatatagcagctctctccatatcaattctgacaaacactatcaactttatttcttaaaactgtcccttagccatattcattcacccctctcccaccaatgttgtaggattccaagccaagactttctgctttgaagccctttaccaatgcaatcagtacccaacatacaactttccatccagtatttgtcagtcaagatatcacattaggttttcccttccctcttctcttcactttcccatcatcactgtagaagcctctgctacctgggacttcctctccctcctcaaaaatgaagaagaaattaagacattcccagataaacaaaaactgagagaattcactgctagcagacctgccctgcaaaaaacaaaaaggaagttcttcaggtagaaatgaaaggacactagatactaacttaaatccacacaatgaaatcaagagtacagcaaaggtaactacagaggtaaatgtaaaagacagtataaatgtatttttttcttttctttgtaactctttagagcactcctaccataagtataaattacaatttttaaaatgtcacgctacaattcaataggtaaatactgaacctgttttaagaagtacgttttatatttcacttctagaatagagataactaaaggaaatacagcctctttgaaaataaggaaatgcttcaaaacaaatctgtggtagatgaactatccctcacatgtcataggcatatagtactcttataacttgattatttagctcaatgaagttttaaaatactaaccacatcttattttacctcttttatatctctgggacctgtccctttttctctatcaccgcagctaataccttaatccagggtatcatcatttctcccctggattattggcagcctcctaatgggtattcctaatattagtcctgctccactttaatctgtttcctatactgatgccattagtgacataacaacaacaacaaaaatcagatcccaccattctgctcaaaattttcaagtggcctcccataatcttcggggaggaaaaatttaaattcccaaataatatacaggtcaggacatgaccactacctctgtctccagtattagaatcaccacatacataaataatctacacccacattctctgctacagcccttaagagttatttaggatcccagaataccacacatctacttttatacatgcttaccttctctgattagaaaaaccttactttgtctacccccatctctacttctttagtcttcaggactcagtgcctatacctaccacccaccctaactcccaataatgctgagttatatcatctcatagattctagtcacaattaccacagtacttaccaaaatgtactataaacacctgcttgctatgtatttatcccacagactgtaagcttcttaagcataaagattgtttccttactcctattttttgtccctagtatacgcaaaaaatgtctgccatggagtaagtgtttaatcaatgtttgaaaaaaatgaatgaaaggatgaagcaggttgtacattgagagacccatggagaagctgttcaatttttactatctataacaaagacaaacatcaaaattaataatctgataaaactgaaataccaaaattaatctttactttgtaatcagtaaaaataagtaaatcgatatactaatgtaattcttaatttttgtagttcattcttcaaaatattttattcaagcaagtgggatccagcaaaaaaatggagaccctccccaaaacttttacaaccagaaaatgagcttctttcaaattctgatgtggaattcccaagtaatcttgcagcaaattaaacaatatgatctatgatccatatgtaggccttgactattaaacttattttgtcttattaacagtattggagggatttttttaacaccatggattaaaaagtgaaaatgagttttttaaaagtaaagcttaaataacactctatctactgttttgcaaatgtgttatgaaggctttgaaaccacaaaatttccaacagacctaaaaatgtataatgtgctatatgtcaagctgtatttctttttttttttttaaactttaagttttagggtacatgtgcacaacgtgcaggtttgttacatatgtatacatgtgccacattgttgtgctgcacccattaactcgtcatttaacattaggtatatctcctaatgctatccctcacccctcccccaaccccacaacaggccccggtgtgtgatgttccccttcctgttaattcaagatggattaaagacttaaatgttagacctaaaaccataaaaaccctagaagaaaacctaggcaataccattcaggacataggcatgggcaaggacttcacgtctaaaacaccaaaagcaatggcaacaaaagccaaaattgataaatgggatctaattaaattaaagagcttctgcacagcaaaagaaactaccaccagagtgaagaggcaacctacagaacgggaaaaatttttgcaatctactcatctgacaaagggctaatatccagaatctacaatgaactcaaattcacaagaaaaaaacaaccccaacaaaaagtgggtgaaggatatgaacagacacttctcaaaagaagacatctatgcagccaaaagacacatgaaaaaatgctcatcatcactggccatcagagaaatgcaaatcaaaaccacaatgagataccatctcacaccagttagaatggcaatcattaaaaagtcaggaaacaacaggtgctagagaggatgtggagaaataggaacacttttacagtgttggtgggactgaaaactaattcaaccactgtggaagtcagtgtggtgattcctcagggatctagaactagaaataccatttgacccagccatcccattgctgggtatatacccaaaagattataaatcatgctgctataaagacacatgcacacgtatgtttactgcagcactattcacaatagcaaagacttggaaccaacccaaatgtctaaaaatgatagagtggattaagaaaatgtggcacatatacaccatggaatactatgcagccataaaaaatgatgagttcatgtcctttgtagggacatggatgaagctggaaaccatcattctcagcaaactattgcaagaagaaaaaagcaaccaccacattttctcactcataggtgggaactgaacaatgagaacacaagttgtatttctaaggtaggagaaaggttacatagtctttaatactttctcctttacaacaaacttttccttatatataaaatacagcaaaaatagtaccttttgttcaaaggattgttgagaagactagaattcacgtaccacacttttgcctcatgcacaataaaaactttttacatgtttaggtgttattattactataattattatgacatatccaagtcccaaaaagttatcagcagtatactctgcaaaggaaaagaaaacacaccactcagataagtctatattcattaatgaatatatctacataccaaacctgcccccatttctttctactgattcccatctaattgaagaaagattttagtagtattctgctgtggattgactcttaaatcacttcactaataaagtcctatgaaaatttaaccaccaccaaaaaaaaggggatcagcacttaatcgcaatcctggattgcaatatgagtgatcagatgctaccccggtctgggtcttcatttcttcatctgtccaatggcaatcacagttcctatcggatctcatagggttaactatctgtgagaatttaaagattataatttatgtagaattgtttgctaagcttgaaaatacttcataaatacagactaataatactattgctgtacaatgccaaataataaatattctacgttttaagcagattgtctttgcttccttcagaaccaggtcttgactctttagcccaacttcgtttggtttggatatataaaacgacatcttataaggtgttcccttcaagggtactttatattactatgcataagaaatgctttccatattaactgaaaaggagatgaactaataagttcaccgaaagcataaatgactaagaggagagagaatgatctctggctttgagaattctcttagaagtactgcctataatcccagctacttgggaggctgaggcaggagaattgcttgaacccgggaggcggaggttgcagtgagccaagatcacaccattgcactccagcctgggcaacaagagcaaaactccgtctcaattaaaaaaaaaaaaagtatctaggtatagtaagtagtttaactaaaaacagtcttagaaacatggatcccaattcctaccctaaattccactaggacacaacattcttataattgtatgtactgttctttcttgccaaggtactcagcactaagaaggcaaattcccagaaagaatgaaaagtgtaagaatgtatgtgcactaactttaacttcctactgtgtgtcaaacactatctttacctactttctcatttaactctcaaaacaaacttgaaaggtattacatcttttttacagatgattacgttacgtaattcacagagatcgtattagagagaacaaaatgctgaaactaaaggtctgactacaaaggcagttctttctatttcaccacactattgatcctatgaagcagaagtcaaaattttaaaatgtcatcagagggttgtatccccattgaagtagctggttacataaaccaccaaggtttctttttgtttgtttgttttttgagatggggtcttgccctgctgcctaggctggagtgcagtggcacaatcatgactcactgtagcctcagtcttcccaggctcaagcaatcctcccacatcagcctccggagcagctgggactacaggtatgtgcaactgcgcccacctaattttattttttgtagagacaaggtctcactatgttgcccaaactggtctcaaactcctagactcaaggaatcctcctacctcagcctcccaaagtgctgtgattacaggcatgagccacaaccacacccagtacccatcctgattttttttttttttgagaccgagtcttgctctgtcgcccaggctggagtgcagtagcgcgatctcggctcactgcaagctccgcctcctgggttcacgccattctcctgcctcagcctccagagtagctgggactacatgtgcccgccaccacgcccggctaattttttgtatttttagtagagacagggtttcaccatgttagccaggatggtctcgatctcctgacctcgtgatccacctgcctcagcctgccaaagtgctgggattacaggcgtgagccaccgcacctggccccatcctgatttttaaggaaacttcaacacgagttcttccagtcccttttaaatgatggacactgtcaagaagtaaatttcacctaataactggtttatccagaaagaaaactgactcctcattcaaatggcattatattaaaccagaataatctccttaccttgacacaatggtttttgtaaatgtaaaaaaaaaaaaaaatcacacagaggtattctgattcatccaaggacattttctatattagcctagtaacatatagaataaagtaatatacaagaaaacttaggggtagacaggtatatattcagccacatgcttctcaataagaaaaatgatttatctactgtaagaaaaagtaaccttatagtaaaaaacagcagcagaatattacttgtaatagatgttaaatatttagtgtctctgttagttctatatacagttatacctaatcatgttaagtgtagagatttagcctcataaatatttctataacagaatataacctatatttcttaatacacaaggcaaatgtaaataaaacaaagatttgctggtctaaatacccaattctttaaaagtaaaccaaaattttcccatataaattttcctttggagaacacaggaataaatcccatctgatgaaggaaattatcaaaagaatacacattgatctaacatgtctggctcagtttgcctattataaacaattctggtctctggacatgaaaaactaataattttcagccacttgttttattacatctaagtctcaattattcacaactaaaaaagatagaataatgacattttacaatgtcccaaacacatgaatcaatcatacagcaggtggaaaaaatgctagaaaagataacatttgtgtcagctttacctctctctcacaggagtctcaacagtgtaaaccttaattcgtatatcttgactgcccagagccttccagagaaaaggatcatattgtctttttaaaaaatctcaattgtcaataactgaaggaaagcaagcatagctttccaaaacaactgagtccagatattttttccattgttgctgtcaattacttttctaatttctaattataattctaataaaaacttcagcataactaagaaagacaaactaaaactactcaggaattttcatgcaaaacttccaattatgtgtcctaaactcttttactccaacatgagttcacaaactctgacagatgttttataaccctgtttaaatatttagtcagtaaaaggataaaatttttaaaaaacagaatgatttcattcttttcaaaaaccagggtggtctatgggcaattttggtactagcagtgttgccgggggaacaaaatgaaaacaggtgtcatcaaattcaaattaaagatttacttctattttaaaccaccttaaacaatgtttccataaactttctaactgatactactataaatttgacaatattttataacaagaaaaggattataaattgtctgtagaccatcaaattttaactgtaacaaattttgactgattggcaacacttccttttaaaaaacttttttcattaaatatgcagcatcattttaaaaattgaatgtataaaaggcaagtcaaaataagaaaagagagcaagtatagactctgatagtcttttctgaaagattttactttgttttgagcctatgctgttttaaaaataaaaaacgaagtacaaaacaaatgttaaattcacaacatataaggaaaaagtgatacaattagtaacatgacaatcataacttttcctcataaacttaattgaactacaatcttcaatgttaaaaaaatccattaatttttgtgtcttattttggtaatgaaaagagtataaatacttggtttctaccattaaatagcacttatttttactcttaaaagagatgatgaagcaagtgactcaccatataaaagttaatcaatgcttaaaaatacattagagtattagacactttctcagttgtttaatacagtttcagtgacaaaatacacttacttttgttaaaagctttaattaagaaatgaacatataagaaatttttaaataggtaatattgcagattggttatgttcttcttaataaaactgtttaagattctttcagaatggattaaatacttacccagtgaggattctagatacaggtaagatgaggtgtacattcttcagtattattaatttaaacagaattaatttctctttgtattagttttgacaggtgaaaacttcttaaacttttaggggcatttaatcttgcactgaggagagtccttttatcttgactgtgaataatcaaattccattgtcatttcaaatctttcagacagttcaaagttttatttttagcagtgcttcagggaggcacaagttggttcactagtgtggaatcataacttacagtcagctccaccagttggattatttccaatatttattagtttcatcaactagttttcaaaaaagcttaaagtttcagtattaatagataaatgtctttgaaactaatatttctagcttaaagtttccattaaattgtatttataaaaataatacaaaatcttttttcagattactacatgtattttaatagtaaaagaaaaatatacagcattatataatgttgaacaatataaaacttcctttacagttagtttaaaataatctcacttgcatataattataaaattactatactcatctattgcttactttgaaagtgattaatcaaagtcagagaaagccaaccatcaactgaagtgtgttacaaatttccttctcagaggcacatcaaaaaaagatgagtcaattctactttaattaaaaccttgtttaagaatatgaaataagtgttttctgtataattccaattatatttcaattgtgttcagctttcaaactgcctctgctacttgattacacgtgccaaattaatcttgtcttttttttttttttttttttgagatggagtcttgctctcgctctgttgcccaggttggagtgcaatggtgtaatctcagctcactgcaacctccgtctcctggctccaagcaattctcctgcctcagcctcctgagtagctgggattacaggcacgcaccaccacacctggctaatttttgtattcttactagagatgtggtttcatcatattgatcaggctggtctcgaactcctgacatcatgatccacccacctcggcctcccaaagtgctgggattacaggcgtgagccactgcgcccggcccattaatcttatcttttaaatcatatcaacagttctaaaaaaagacttggattttttattgttctagtgggtattgttctagaagcaagactcctctaattgatcataacaccaagcctaccccttagctgacagttcagatgtgtgtttttggttggttcaaatacaggaagacaccctttgtatacatttgactaattagtcaaagaataagaaggcaggggaaagaaatttatctaaaatattttttgactaatacatagcagtcttccaaaaattcaaagtggaatttttagagaaactacatgttctaacatgttctcttagggtgcttcatacagatcgtcaaggaagtatcccaaaaaaaatcaatgaacacccggaatacagggtcttcaacagaatcaagcaacatgttacacaactgagggtaacaaagtatcagtccctacaacacttgtgtcaaacaaatctgtttctcctttcaccttacttacctcctttctcctaccctgttctatgtatggcctagcccttcgaagatacccaaacacaggaaagattaaagatccctttcaaacgatagaagatctctttcacacgatagatgataaaatgaagagatgttcagaaggctgtagctgctagcattcttccaccataagcttctccacctatatctgtagtagataactgtacttttagataacttttcaacccttttgaagggtttcaggttaacaaatatttgaaaattagtactcacaacactgtatataaaaatgaatagaggccaggtgcagtagctcatgcctgtaaatcccagcactttgggaggccaaggcaagtggattgcttgagtccaagagttcgagaccagcctgggcaacatggtgaaaccccatctctacaaaaaatagaaatattagctaggcgtggtggtgtgtgcctatagtaccagctactccagaggctgaggcgagcaggtgcccaggctcgaggggttgcagtgaaccgtgatcgcaccactgctctccagcctgggttacagagtggggcctcatctcaaaaaaagaaaaaaaatgaaagaagtatggactcaggaaagaagtactgacacatgataagcaataatctagatgcaaataaaaatcattagatttaatataacatctttaggctcaaatggaagctcactaaatattaagtcaatcaacactgatagaggcaggaagcagaaaaatcctagtcagacagggtgaaaccccaccttcaagtcaaaaacagcctgaaacccatgacccagagagagaacttctatttctgtttgcctgctctttcccaactggttctttctgaataatgctttttaaccaatcaaatgttgccttttccaatactacctgtggcccatgggcccccccgatcctgtgcccataaaaaccccagatccagccacactgagggagatgacccaacttcgagtgagagaccaccttcctgtcccctctctagactgagagctgcttcatcactcaataaaattctctgtcctcatcacccttcaattgtcagtgagacctcattcttcttggacatgggacaagaactcgggacccactgaatgtgggggctgagtgtgcagttgtggcagctgtgggatccacactggagtgcaagccagatgcggcctggcaggctgagtaaatggggcacctgctcctgcgagcccagcaaaggggccaagaaaaatcctgcatcaacactatttaaatgttaaaggaaaagtcaatataagtaacatgtataacacactaaaaatatattaatgataaggcaaaatgaaattagagaatgtataataaagctctgtgggataagaaccttctcttataacattctgtcaatggctgaacttccagaaacattacctatgaaattaaggacagcctttgtaaatagaagggctaactccttacatggagacttaccacccagaactattgtctgaatccatctgagggggaaaaaacccatttccatggtaaggaacaaagcagagacaaagttcattacagctacatacaaatggaaatgccataaattacataaaagctcatacaacaaagaaactagcaacttggttatttgtatacatagaaagacagcaggaaataaaatattttatattatatgaaaacaaaatgcttaagaactcactgacacagttatttgacaaatatgctgaggtttttgtatataaattttttagtttggggtttttttttgttttttgtttttttgggacagggtctctcgctctgtcacccaggctagagtgcagtggtgtaatcatggctcactgcagcctcgacctcctgagctcaaaagttcttcccacctcagcttccagagtagctgggaccataggcacataccaccacacttggctactttttaaaaaatcttttgtagataacagtgatatggtttggttctgtatccccacccaaatcttaccttgaattgtaataatcctcaggtatcaagggtgggaccaggtggagataactgaatcacaggggcagtttccccctgctgttctcatgatagtaagtgagtcctcatgagatgtgatggttttataaagggcttccccctttgcttgccactcattctctctcctgccaccctgtgaagaggtgccttccaccatgattataagtttcctcaggccttctcagccatgtggaactgtgcatcaattaaacctcttttctttacaaattactcagtctcgggtatttcttcatagcaccatgagaatgaactaacacagacagggtctctcaaacttgcccaggctggtcttgaactcctgggctcaagtgatcccccaacctcagcctcccaaatatgtagacccagcactttggaaggctgagacatggtgggcggtgggtgtggggggttagggggttagggggtgtgattggtgggggtgttgtgccaaggggcttgaggtctcaaagagctacgatcccgccactgcactccagcctgggcaacagagagaaaccttgtatgggaaagaaagaatttttgttttgttttgttttacagctttgggaaagatcttttctatagaatcatatatctgatattacaataaaattatgactcaaaaatttgttttacataaaatctctcatctacatgtcctcaagctaattacttaaacaacatcaccatctcttccacaggcactagcacatttagaaaagaaagaggtttgggttttgtttttttcctgtactcaaagttcagctaagtaaagaaacaattatttcccaaaggtttcaaagcaattgcctcagtaaatcaaaagaatgctttcctattagcaaagccatataatttaagagtaaagggttaagatgatttaattttctcaaagaaaaaagtgaaaagttaggtggctatacagttaatgaccagaattctggaaaactgccaaattcaggcacattctaaccatcaagttattactatttagtggaggtcgggggcagtcactaagaactttttatgcaggtttaaattttacatacagagaagccatataattattgtgaaatacttcaagggattcaagaagaagctatgacagtttgctgtgtttctttaaaaaaaaatgcacatttactgactttgagtggtatttagttccaaaaatatcaaaaatatcagaaagataatgtctatatttaatatttggtattacatattttggttatggcttctaaactttctcatagcccaggcactcagctattcaacctaaatttttccagttgcctcaatgttatataattcccttttcaattttgttcagtcatacttaggatctactttatacaaggatgaataaaacactattttacatctaggtcataagaccaggatataaagtccagtgtctgggttctaatcctggttctaccaattactagttctttattctctctataccttactttgatcatctgtaagctgtagatatagtactaacacccacaaaatagggtttgatgtgagaatcaaataagttagtatacaaaaaatactcagaacacaaccatataaaggaataaaatgcgtgctacaacataaatgaacctcaaaaacattaagctaagtgaaagaagccagacacaaaagtcacatattgcatgattccatttagataaaatatataaatccataaagacagaatgcaaactggtggttgccaggatcggaggggtggggaggggcaggtgggatggtggagaatggggataaaatgcttaacaagtaccgggttgtattttggagtgaaagaaatgttttagaactagataagagttctgaaggccactgaactgttcactttagaatggttaattatatgttatatgaaattcatctcaataatttcaaattttaaaaaaagaaataaaaaacaatttattaacaccatccaaaaaaatacttagaacaatagcagtgatacaaaatgagttcagtaaatgtacactgtaataattatcaatgccacataaactggtaaatatgtagaatactatgctacattccaaagattaaaataaatatacataggtttggagtttatgttttcttttaagtactcattttaacaatttatttctcctaaattcagcatgaaattatgtaattcatctacaaggaactctcgcttcctccaaaagagacactcagagagaaaatacatatgaaaaatggaaactaaaaatttattttgtacatttactgctatatgtcatccaagttatgttattttaacatacagtgcttatgtgttaaactatctgggaaataaagagatgacatgcatgaagaaaatatacacaaaaggacaaccaaagaattattttgtaaatttaaccccacaaattataaatattatattgttacattcagttgtttaaacaatatataaaataccactaaaagactcatacacatatttataaactcaatgaaatgttcaatttgtgatgaatcagaaaaaaatgagaaaacatcttcataatgggatacaaaaatggaatttagaactggatcagcctggggaaagcaaattttaaaaagacaaaatcatagggctagatttgtggatatgagaaatcaatgaattcatttttgaggcaaaaaaaggtcaaagtaaaaaagcattctatatatcaaacttaacacatttatactatagtttaaagaatatgtcaacaaatgaagagatcacagttcccaaataattatagcagccaaaaggtcaagtctaaaaacccttcacttcaaataaaaagctactaggagagactatgaggtactttctactaatatctcagaagaaaactcatgaaatattcaaaagcaagagaataattcgtatcttccgtttctttgcctcacatatttgttttactattagaagaaggctgtttttttgttttctttgtcatgactaatgtttatcttataaatttctattaaatgtgttaccaaaagttcctgtcgggaatggtaactacatttcacatacacatttataaacaacaaaagagaaaactgtcattaattttaatatggaattaaattattagaataaactttcaaacatatgttgaccagtcaaagaattgtggcatgatgcatgtagccttcactgtttcaaaagcacagagtttaggtcaagctccttaaaacagccaaatgttttaacaagtaaagaaaaatatacataaagtgcttcatgaataaaagtagttcaaatgaacaaggcttgtggaaaataaagcactgtacagattttatatcaaacatgccaagaatgttaataacactacactacactatatatgagaaagaactctccaactacaagaattgttatattaaaaatatacatgttatctttttctgttaacatctttaaacaaataagtcagctagcttcctgaaatgatgtaaatgtgattcaacctaaagatgtgattttcttgcacgtcatgagttccataaatctttgaatacaaatattatgcattttatatgccatcttatctgtatgtctataaaaaaaatggctgagctatggaaaaacagtatggtggttcctcaaaaaagtaagcatgaaattatcatatgatccagcaattccacttctgggtatatacctaaaagaattaaaagcagggactcgggctgggcgtggtggctcatgcctgtaatctcagcactttgggaggccgaggtgggtggatcacgaggtcaggagatcgagaccatcctggccaacacggtgaaaccccctctctactaaaaataacaaaaaactagccagacgtggtggcgggcagcctgtagtcccagctactcgggaggctgaggcaggagaatggtgtgaacccgggaggcggagcttgcagtgagccgatattgcaccactgcattccagcttgggtgacagagcgagactctgtctcaaaaaagaaaaaaaaaagcagggactcaaacagaatatttgtgtgtccacattcatagcacgattcacaagagccaaaaggtggaaacaatcgaagtttccatcaatagatgcacagataaacaaaatgatgtgtacgcataaatgaaatactattcagccataaaaaggatatgaaattctgacagttactacaagatgaatgaaccttgaatacattgtgctatatgaaagcagccagacagaaaaggacaaatatttcttgattccacttacatgaggtacccagaatagtcagatttatagaaacagaaaatacaatagttctaacttgaagctagaggagaaagtagtaggaagtaactgttttaacaggcatggagtttcagtttgggatgatgaaaagttctagagatgaatagtggtgatgttgcagagtaatacgaaagtatttaatgccacttaaaaacagttaaatggggcggggcgcggtggctcacgcctgtagtcccagcaccttgggatcacccgaggtcaggagttagagaccatccagcccaatcaacatggtgaaacccagtctctactacatatacaaaaattagccaggagtggtggcacatgactgtaatcccagctacctgggaggctgaggcaggagaatcgcttgaacctgagaggcagaggttgcagtgagctaagatcatgccattgcactccagcctggggaacaagagtgaaactctatctttaaaaaaaaaaaaaaagttaaacggtaaattttgttaagtgtattttgccacaataaaaaagtaaaaaaaaataagttctgtgtatggatggtagtgacggctgtacaacagtgtaaatgtgtatataacatctctgaattgtacacttaaaaatgttaaaatggtgaatttatgcttatttccacaatatttttaaaagctggttaaggtctttcagtaattagcttcactctaaattatttttaaggcagatcagaatatagttgctcagaggcttctaaatactttgtaagcaactgaaccaccactacagctaaccagcacccctaaaccaattattgcctagcaaagtattactgcctttcaacccactggccctgcctaagtctggcaaccatataaaatgcttgatactgcttctgcattaataagcagtgagctcttcaaatgtaacacttgatgtccagggcaggagcaggttatagacatagtatgcttaaatctactttccccatggttgatgactagacttaaatcctcagtcacattccctgctacctgactggggccttgtttcattatctgtcgcccttggccctactccttacatctttaatcctctcctctgggtcctacatctcattctaaaatcagactaagtctcctcatgccattaaaatcttccctggactctcaaaccttcaaatctcaccgcacccccaccccccgcccccaccgccacccaacttactcctcttcttggctaccgaacttcatttctggatcccccaggaattgacttcagcctgctacttgactgaattacactcctgaaagttaaccatgacctccaatctgataacctattattcatactacccaaactaaaggcaaaaaagaagaaagaagaagaaagacaaaggaggaagaggaaggaagaaggaagaaggaaggagaaggagacggagatggagatggagacagagaagaggacaaacatttgtaaaaggtcatcaatcacaacctccttaaaactattttctcccttggctgaaactctcctaattcttctcttactctctggtctcttttatctccttccaccaaatctccaaatatgggtacttgtcattctgccttcaccctttttcttccctctcctaggaatttttcagaacttttcttctcaaaacttcgcaaaacatttgaaaatgttttttacattttatatgaataccatcagcacaagaggttgcagaaggagtcaggtagttggagaacaattctgcctaccccagtaactaagaagctggcaacagaagtatgcttccctactgcacatgtatatatcagtgtccaaggttaagaaaaccacatttgtattttttggcaggtacaatacattttaaatgaaaaaaacatttagaatgttttcttttcaaaatgattgtactgatagaaggaagtatctaacaatctgttcattattaattgcatgttttctgatatggttaattatttaggcttgatgtaatcactcagctggttaagactgcttactgatacaaagttaaagataggatgtacaaatgcaattaaatatcagtttcttaaggttaaaaaaaataataatttcctccaatagagagttcttaacattctatgtggaaataaaatttgtagaaaagaaacagaaaaatgaaatccatagagaattgatatgctacaccttaaattaaaacttatcatcagaatacttaaattcttaaaaagtataatttatgatatttaataaataatttatgagtatgaaaaattaaaaccatggacttttttaaactttaggattaatgactagtaatggcttctttgcataagttgcttcctttcgccttaaacaaagaaaccatacattttaaagttttatcataaaaacagaatgtatatgaaattatttcactttagcaatttttaaagtattttaaggctcaaaaacttaaggatatgggaaagtgatcaagatgtagtgatagaggaaaaaaagaaagttataaaacaatgtaatctcatgattccaattttggttaaaaaccagtatgtactaatgggcacagtagatacacaaagtacacagaagcccatatatcaaaatgttaatggtaaatcttgaggtagtacaagtatttttattttcttccttatactttgttttcttcctttatacctttattcctttctatagcaaacatgcatcacatttacagttgagttttgtggaagaataaactctatatttcattccatttctgccttcctgcttatattttgatagactaggaaaggaccatctttcaaagctgtgcagagtaactctttagcattgtcagtgctctcatatacctaatccatcagcaaatcctgttaatccacttacaaaatataacagaattcaactactcactattttcactgcttcttcaagagaagtcaccgtcatctctcggtttatgcaaaagtctcctaactagtctatgtaattccacccttaccacctttctggctctaatgtcactcctctacttagaaattctgtgacttctcatctcattcagaataaaagtctaagcactgattgtgaccttctaggctctatgatctggaccaggaatcaccatgcacactcccacttcagcaccacagaacttgcagtaagttggctctgcctagatattctacatccagataccctcattttcttcagctttttattccagtatcatcttctcaatgaggccttcactggcaatccaacacaacacatcaaccactccaccctacccttgaaatttcctatcttgtttccctgttttattttttctactctagcacttatgactatctaagacacatgatgtatttatttatttttgatattatctccctccctcagtagaatataaactcaataaagagaaatttttacctttgtttttcctgctgctgcatccctagtacctagaatagtcccaagcacatggtaggtactcaatatatatctactgaataaatggataaatgcattccagtgaatccacaagcttaaacccacagcttctcagttacagtaatagttggctcaatgaatgtcatgaaatgatagcaacacatttattcatattctgagaatcaatgactttctaagtgactttgcatagggcaagagagctgaagaacagctatagtaaacaataatgtagacatattttctcaagcctaaaagggagcatctaggatcttagcttcaaaatttatgaataaaattatgacttgatttggtataacaaaggtaaggtaccctgagatcatattgctgttattgttggtactaaaaagtaagcaaaactgtctaaaatcatattgttactcttctaacttttccattagaatattcaataccagtctgtgaaactggatatataactttccttatgcaaacaaaaaactagctgaatatcatactactatgcacctgagtatctgttatctgaaagatctttggatcttttataaacatcaatcaatgctgtgcagacagagctaagagggaaaggcaattagatactgtgaaaaaatggaggcaatcagaagaaatacagtccatggtggcagtgacagagctaagcaggaggtatggataatctgggtaagtgccatggaaaaataaatatcatgattgaacttgaggcaaatggaaacagttcaaattggcttcatacactactctgtggaacatatgatgtccatatgtccattaccaacaaactgaaacatggaaaataacaaaagccgatgctatgatggctataagaacacacccaatgccagtctctaccacaccgcagcagcataacttactacagctgccaggtaagttggctaagaagtcagaagcaataagaaaaaaaggagaaagaactaactataaactgttctctttccctacagaagacaaagttgggatctatactagaaagtagaatgtagcaacgataaaggctgaaagtaaagcacaattttttctctgtagacagtttctaaaagtataaactactttggaattaaagaaggcaacattttatccaaaactacaaacgatttaagatccagagaactaaataaaataacagaggaataagatggaataacttccaaataaaaaattataaatatgacctttcaagttttgaaatacataatagagtataaaaagaaactgaacaaaagatgtggtgggaatccattatgttttacatcagttttaattagtctaccaaattttccttctatagtttctaaccccacctttcttttttttttttttttttggtgttgttgttgttttgagatggagtctcactctgtcacccagggtggagtgcagtggcatgatctcggctcactgcaacctccgccttctgggttcaagcaactctcctgcctcagcctcccaagtagctgggactacaggcgcgtgccaccacacacggctaatttttgtatttttagtggagacagggtttcaccatgttggtcaggctggtctcgaactcctgaccttgtgatccaaccacctcgacctcccaaagtgctgggattacaggcgtgagccactgcacccggcctctaacctccacctttctatactctctaacccccaaagcgattcatcttcaagatacaataagagttgacataaaagaagtagagcttaacttaggcaagtatcatgaaggaccaatttacacagcaaagccaaaactgtaaaaaaaaataaaaatataaattttttaataatgtttaagtgttaaagcctatctggtggtcctgaccttttcaaccaatcaaaaccaggccagtcagatgaactgtataaaaataatatgtacaactactacatatccataatacttaaaatgaatgtttaagaaaataatctcagcacttattcagaaatatactagtgtcactcaaactatacagtaatgaaattcagcagctaaaaatatataactattttacagtaaatatcaatgtcattcctgtttcaacctgacttcccattctacccctaaactcccaaacttgaaaccaactacaatttcttgagtagctggagtgtggtttaggaaaggaagctatgcttgtttgtatggaatctgccatttcctccctgccaaaacacttgtttaaaaagtcatgtaatatttctattaaattgtaaatgcagtcgacaaggaaatggcctactagcagtgtattacctttgtggcagtgccaacgggcctacagcaaaatagtgcacatgataatttcaacatgcattcccaagtaacaaaattgtgctttacataaataccacagaacctgagcaagatccagaaaaagcaatgaaaatctgcccaagctttcatgcttgcctatatcaattgtatgtcataagtaaagcaaaatagaaaagcatctacatatgttcaagaagcttgtgaagttagatcatataaccctgggaaaactattgcagcttaaatctgtgtatttcttgttaaccactgtaacaactcactaataaaaatgaagaaaaaccatggatatcaaatgaaccaaaatgtactaactacatacaagtccttaaagatcatgatgcaacttattaacaggaacatattttcagtgtaagccacaattgttatgttaaattacttctttctttgatatcattcatttgattacagaatgtaagagattcacgagcattccaattaaaatggtgaccttcagtttataagtcacttaccgaaatgcttacaaagtcaccgctaatcatttatttcttaccttgcattgcatagcacaactacatttaattatgcaaattaaatgatcccagatgtaataaagatggttctattcatgtgaaagttatacttaaaaccaagttaacaaaattaaataattaatctgtaattaatatagtcttctaggacagctgaattctattctacagcaatttaactaaaatgcatatttattttataagtcaggtatgacttgtctttctttttaaaaatatcaatcgacacataatttcaaaatttaaacctgatagagacaccatttcctccaaaaatgtaaatttttaagtgttatacacatgaaattagagtaaatacctgccctcagtatacctccttccaccttcctaccctatgcacacctagctatttatgtctcctaaaataaatgctagcttaaatctctggcacaaatagttactattactggcttagaataaaataaaacttactatgaccaacagagtaagtccacacaattgcttttaagatatatatcttcaataatgcttaatggttgtctgttaaaacagttttcatccccaattagcaaaccaaagctactatatcctgaggccaaaattaagggtgcccactactgatttttctgatctctaataaggaacaggaactaaagtgccaaaaaataaataaataatataaattatatcaatttaaaatttaaatgttaaataaataaattgtgctaagtaaaagtttgaaaggcaagctgtgagggatgacagctctttcaagttggatttgattagcatttaattactttcactttttaatttatttcattgattcttatgctaagttgtaagtacaacacttattattttaagaaagaaaaatctgagcttaccagatttcagtattaacaccacagaagtatctttgagataggaaaggaaataagcacatattcaacaaaaatatttattggatattcttatgttagaatctgctagattcatttagacacacaaagatgaaacatacttgaatttaaaacttagatttagtagggaaatacgacaactatatcaaaataactatgataatacacagtaagtttaaaagtgccataagaaaattatagataaggtgatatgagaattcaaagaaagaaaagattttttaaatcagtgggatgaggaacttctaacaataattagacttatctaaaactaagctttccagaagtagaaagattacgggaggaagacatcataatctacatttggttccaggttgaaatgcagaactgtaatatgctatgataaagaaaatagtaaacaaaacactaccctaaatacacaatgtaacaagatacactcttgagggtcactgatattaagaaccacagttctcagttattttcgatcaaggaatccttgtttcaaggagttattattttcatttgatggaaaactatgaactatcttaccagaaaaatacatatctgcacaaacatcaatatttaagtgcaatttcataagatgtgctgactgaattctctgccccagaaacagctcattctaccctcttgtgaatcatggtttccattactgggctagtatgcagtataggggaaaatgaagaagtaaaaaataactgtttttcatcattagaaaagataaaatgtatcacagtcctaataggctcattattttcatattgcttccagtagaggctgcagaagacatctcagcagccataagcaagaacttaaaagttttcagcaatctcccctggctagcaataaactgtcaataagcaggttcaggcacagaaacagtaattcctttgggtactgtgtaacgtcccaatacctcccatcctactgaatgtcctacaacaaaatcaggtgatgaaaaacaactgctcgatccttccacagctcaaagttccttaagtaacaatagtaaatattaaacgggcatcctctgtaagaacctgaactaatttatagtctcaatatgttacttcaaaagcaacttcataaagctagttcatatttctacagtacttagtattttacatgtattgttcatatacactatcccttttgatcttcaaaaagaactctgtgaagtagatggatgagggtccattataactaattcagagataacaaaattgattcaagcctcacaagtctcaaacatcaggtcacaccattattacgtagcaacaatagaagcattcggactttgttagaatttggatttccaacacctggttcagtaattattgctctatagattcaagttgcaaatcattactgggtcataaaatcaatgtaatggatttggaccacacattttttaacgaaaagatgaaacagaatagaatactgtgatagaacagaagtcagagtgaatcacaaataaggaaaataagtatggtttcatgtatattttgtttcacttatgtgtgtgtgtgtgtctgtacacatgtgcataatggatcacactgtgaaaatatttctaccatggaccacaattttaaaagtctgaaatgtaaatgtcatctttcaatcattaataaatcaatttaactcatctcctttaaattctcccacacaaatacagagaaatattgcatttgtcagtatcccacattaaaatcctaaaaagatgaaatgtagtataattctttctcagtaagtattactctaagcaatacttaatggaaacacgtctccaaaactataattcatatttatataatttgtatgtcagtaggaaaatgataattatttcctcaatattaccaaactaatcatgtgtacagagcacttggcaataccaacagcaaggttagaatacagacgaagagtaggaatgcctctttcctgtgtaagtatcaggggtgaccccagcaggcttaatctagagaagttgagacctgtttattctcttcacttgttcatgtcttaaagaataataactctgacaagacaaaaatatgttgaaactgtcactgtaataaaccttaatccccagtttagggtctaggatgccttataccaccaccacccttcaatgtgtatcaggaccacaaagcagagaactcttaactttcaaatggagtaaaaatccatgtcttggaagcagtactgaaattccctgatgatcccatttctcccactcctctggatccttggatgatgtgaaagtacggttaatagaatcaaggtatcacctaaaataggcaaaaaaatagggaagagaaaggaaaggaaaccaaaggtagagaggggggtgaggggagagtattcacctacacaccctgtcaggaaacaaaaaaatgaaaagacaacagtaggaagaaaagaaaaaaaggaagataagggcaggttcaagggagaaatgcaagtaaagtatgtaatgacaaaataataaaatttttatctacaaccatatgatcttatgtaatttgagataatatatacatataactgaataaacgttttacagtgtatagcttcctattctaatcaacaaaactcttatctaccctttcctattaaataaaacagaaatctaaatgattctaacattaaaatgctagttatcactgaactataaattccaaaagaacagtgaacatgtctgctgtgcttactactacttcctaacagctcaagtggtacctgataagtgtgcaccaagtatctacagaaggaaataaaggaaagggaaagggagtaaaagaatacagaaggcactctagatgacatttaatttctctgacacaaaacaaccaatttgggagagaagagatactgtccaactggtcccaaagccaaatttattgcctttatgttagaatatgcatttcttgcattaacaatattaaatcaaaaataatttaatattaatgattaaatttagtattgacgaaaacatgggactgtcccatcatgagaagatacacatttacatggcagaaaatttcaagagtgtcattctcgttgctaaaagattcattaaaaattatttgtactccaaaaggtcccactagctcccaagcaattactcctaaccagaatgaaatgtatgaaataacagatacagaattcagaatatggatggcaaagaaactcaacaagatccaagagaaagttgaaatccaacacaaaggaaacagaaaaataatctaagatttgaaagacggcacagttattttaaggaagaaccaaacagaacctctggaactgaaaaatttactagaggaatctcaaaatacagttggaagccttaacaacagactaaaccaagcaaaagaaagaatttcagagattgaagatcagttcttcaaatcaacccagtcagataaaaataaaaataatttttaaaaatgaaaaaagccttcaagaaatatgagattatataaaatgaccaaatatgtgacttactggcattcctgagagagaagagaaagtgagcaacttggaaaacatatttgaagatagatataattcagaaaaaattccacaatcttgctagagggatcaacatgcagatacaagaaatccagataactcctacaagatactacacaaaatgactattcccagggtacacagtcatcagaccatccaaggtcacccaaaagaaaaaaccttaaaggcagctagagaaaagtgtcatatgacctgtaaagcagcagtctccaaactttttggcgcaaggaaccggtttcgtggacgacaagttttccatagatagggttggagggggtggtttagggatgaaactgttccacctcagttcatcaggcattagttagagtctcatgaggactacacaacctagatcccttgcacgtgcagttcacaaaagggttcacgctcctaagagaatccaatgtcagtgctgatctgacaggaggcggagcttaggctgtaattcttgatcgcccaccgcccacctccagctgtgtgacccggttcctaacagttcatggaccggtaccagtctgtggcccaggagttgggggacccctgttctaaagggaaacccatcagactaacagtagacttctcagcacaaatcctacaaaccagacaagattaggggccaattttgagcattcttaaaagaaatgccagccaagaatttcatatcttgccaaactaagcttcataaatgaaggaaaaataatgtatttcccagacaagcaattactaagcaaattcatcactgccagaccagccctacaagagatgcttaagggaggtctaaacatggaaacaaaagaatgacatttactaacacaaaagcacacgtaaagcacataacccacagactctataaagcaactatacaatcgagactacaaagcaactagctaacaaccctgtgatgggaacaaaacctcacatatcaatattaaccttgaatataaagggcctaaatggcccacttaaaagacatagagtggcaaactggaaaaaacaaacaaaatccctctttctcttatctgcaaaagaaccatctcacaagtaacaacacccatagactcatagtaaatgaatggagaaagatcagttaaacagaaaacaaagaaaagcagaggtcttatattagataaaatagactttaaacaaacgactgtaaaaaaggacaaaaaagagcattatataatttttaaagggttcagttatacaagaagacttaactatccttaaatatatacacactcaacactggagcacccagatttatgaaaacaattacttttagacctaagaaaagatgttgacagccacacaataacagtgggagacttcaacaacccactgacagcattagactgattatcaaggcagaaaactaacaaagaaattctggacttaaatttaatgcttgaccaactgaacctgatagacatctacagaatactctaccaaacaaccacagaatatacattcttctcatatgtacatagaacatactcaaagactgaccacctgctcagtcataaaggaagtctcaataaattcaaaaaaatcaaaatcataccaagcatcttttcagaccacaatggaataaaaatagaaaccaacaccaagaggaactctcaaaaccacataaatacatgaaaactaaacaacgtgctcctgaatgacttttgggtaaacaatgaaattaaggcataaataaaaaagttctttgaaaaaaatgaaaacagagacacaacataccaaaacctctgggatacggcaaaagcagtgttaagaggaaagtttagaatgctaaatgcctacatcaagaaaatggatctcaaattaacaatctaacctcacacctaaaggaacaagaaaaaactaaacccaaagctaggagaagaaaataaataagtaaagtcagagtagaactaaatgaaattgagaacaaaaaaccatacaaaagatcaatgaaacaaaaaattggttttttgaaaggatgaatgaaactgacagactgctagctagattaaaaaaggaaagagagaagatccaaataggcacaatcagaaataacaaaggtgacatcacaacgaagcccacagaaatacagcagatgttcagaggctactatgaacatttcagtacatacaaagtagaaaatctagaggaaattgattaattcctgaaaacacaaaacctccaagattgaactaggaagaaacagaaatcctgaacagaccaacaagtaacaagattcaatcagaaattacacacctaccaatgaacaaaatcccccaaagagagagattcacagctgaattctaccagtcctaataaaactattacaaaaaatcgaagaggagggcctcctccctaactcattccacaaaaccagtatcatcctgatatcaaaatctggcaaagacataacaaaaaaagaaaattacaggccaatatccctaatgaacataagacccaaaattcctccacaaaatattagcacactgagctaggtggaatggctcacatctataatcccagcacttggggaggctgaggcagaaggatcactggagctcaggagtttgacaccagcctgggacatatattgagatcccatctctccaaaaaaaattttttaattagccaggtacagtggcacatgcttatagtcctagctactcaggaggctgagatgggaagatcacctgagcctgtgaggtcaaggctgcagtgagccatgactgcaccactgcaccccagcctggatgacaaagtaagcctgtctcaagaaaaaaaaatttatatatatgagcaaaccaaatccagcagcacatcaaaaaattaattcaccaccatcaagtgggctttattcctaggatgcaaggatgattcaacatatgcaagtcagtaaatgtgatttaccacataaggagaattaaaaacaaaaaccatataatcatctcaatagacacagaaaaggcttttgacaaaatcctatactccttcattataaaaatccacaacaaacttgacatcaaaggaacataccttaacataataagaggtatctattacaaactcacggccaacatcatactgaatgggcaaaagccagatgcattcccttaagaactggaccaagacaaagatgtccactcttaccattcctatccattatgtcactggaagccctagccagagcaataaggcaagagaaagaagtaaaagacatataaataggaaaaaaagaagtcaaattatctctcttcactgacaatataattgtatactagaaaatcctaaagattctgtcaagactcctaggcctgataaatgatttcagcaaagtctcaggatataaagtcaatgtacaaaaatcagtagcacttctatacgctaataatgttcaagctgagagccaagtcaagaatgcaatgccatttacaattcctaccaaaaaaaaaaaaaaaacaacctaggaatacacctaaccaaggaggtgaaggatctccacaaggagaactacaaaagactactaaaagatagcagagacgacacaaacaaatagaagagcattccacgttcccaggttggaagaatcaatattgttaaaatggtcatactgcccaaagcaatctacagattcaatgctattcctatcaaactaccatcatcatttttcacagaattagaaaaaaactattccaaaatttatatggaaccaaaaaggagcctaaatagccaaggcaattctaagcaaaaagaacaaagccagagacatcaatttacctgacttcaaactatactacatggtactgtaaccaaaacagcaaggtactggtacaaaaatagacacacagaccaatggaacagaatagaggcataaaaaaataatgggatcatgtcctttgcaggaatgtggatgcagctggaggccatagtcctaagcaaactaacacagaaacagaaaaccaaacactgcatgttcttacttataagtgggggctgactactgggttcacacagacataaagatggaaacaacagacgctaggaactctaaaaggaaggaaggagtggagaggacaagggctgaaaaacttcctatcggatactatgttcactatctgggtgacaggatcagcagaagcccaaacctcagtaccatgcaatatacccttgtaacaaacctgcacatgtaccctaaaataaaaatggaaacttaaataatacaaactgtgaaaaaatatttttaaaaaataatttccaaagaatatgaaatgctgatttacaattattaaatatttacacaacttcttcagaacacacctattgcataatgcaaagtacatatatatgatttaataaaaataatcctctacttggtagacaactaagtcatttgcatagaaacagtgaaaagcattctgattgaaagatctctcaatatagtgattacaaagaagacatacaaagggactcagactgtgtattataattggggtggagaaagtgatatggggacaactggaaagacaataaacaggcagtaaaaagttaaaggagtaggacaccttcaccagcatagaaacaacaagcaggtcagtactagagagaggttaaacaaaaagcccaatttaaaaatgggcaaagcagcaccgggcgcagtggctcaaaacctgtaatcccaacactttgggaagccaaggtgggtgaatcaaaaggtcaagagatcgagaccatcctggcaaacatggtgaaaccccgtctctactaaaaatacaaaaattagctgggcgtggtggcgcgcatctgtaatcccagctactcgggaggctgaggcaggagaatcgcttgaacctgggaggtggaggttgcagtgagccgagatcatgccactacactctagcctgggtgacagagcaaaactccgcctcaaaaaaaaaaaaaaaatgggcaaatgaattgaatagacagttcccaaaagatatacataatggataatggacaataagcatatgaaaagatgttcaatatcactagtcatcagagaaatgcagatcaaaatcacaatgagatgccacttcactcccattactatggccattagcaaagaaaaacaacagaaaataacaagtgctagcaggaacgtgaagaaactggaactcttgtacattggtggtaggaatgtaaaatggtacagctgctgtggaaaacagtatggaggttcctcaaaaaataaaacactcttgaattgatgattgtggatccagttcatggtagcattattcacaaaagccaaaaggaggaagaaacccaagtacccatcaacaaatgaatgaataaacaaaatatgctatatacatacaaagaaatattattcaggctttaaaaggaagcaaattctgacacattctatgacttgtataaattattgaaaacattaggctacataaaacacacacacacacaaaagaacaaatattgtttgattctacttatatgaaatatttagaacagtcaaactcatagagacaggaagtagaatactggttgcgaggggttggagcaagaggatatggagaattattgtttaatgggtacagggtttcagtttgagataattaaaaaatttctagaaatagtggtaatgattgcacaataatgtaaatgtactttatggcaatgaattgtatagagtactttaaaatggttaaaatgataaattttatgttatatattactcattaatcctaattataatcttaaattatgtaattatacttatactatataaatgttaatcttaaattatacataattattaatcttaaattttctttctctatttgaaagaagagaacatattatggggagtgtagtgagttgaaaaatggccatcctcagaagatatgtccacatcctaatctctgaaacctctaaatgttacacaatttgggggggaaaaatacaatttatgcagatataattaagttaagaatcttgaaagcagaagatcatcctggatcatctgagtgggccctaaatccaatgacaagtgcccttataagagaaaggcagagagaaatttgaggtagatagacaaaaaagaagacacagggctgggtgcagtggctcacacctgtaatcccagcactttgggaggccaaggcagacagactgcttaagctcaggagttcgagaccagactgggcaacatggtgaaccccatctccacaaaaaaaatataagatttagccagccatggtagcttgtgcctgtagtcccagctacttgcggggctgaggcgggaggattgcttgagcccaggaattcgaggctgcaatgagccatgttcacgccactccagcctgggtgacaaagcaagaccctgtgaaagaagaaagaagatgatgatgatgacacagacactcagaggaaaatgcaatatggagatgtaggcagagattagagtaagacaactacaatctaaggaaaacaggattgcaggcagccaccaagagctggaaaaagtgaaaaatagattatcctgtagagccccttgagggagtacagtcctgccaacactttgatttcagacttctggtttcccaggctaaatgaagatactcctctatgccattcaccactgtgttaaatccttgcaaggaatcttccaacaggtggtgtcagacaaacacaggtgcacatacactaagacatccaaggtatctacaaatacctacacagcagggactgggagatggaaggtgtgttaagtgtgttgggtgtggtattactcaagtctcaccactacagagaatcagttttccagaatttctcaagcaaattttattattaattgagcaggaaaggaggacatggatgcttttctcttttttggtgttgggtttttttaaatattaaaaaacggttaactaagtgttcactcttcacatgtggacataaccacattttttgtctctttttttaaaatcctttctttgtgaaaaaagtagtgccatgggatttccaatgggagagagctactgtgttttactttttgatatgcactataaagaatgatcttctaacccatgtctgtttttacgctgcctatactaaagcatttgttgcatctatttaaatgctatgtttctccaaaaagggaggtggaagccagttggaaaatatggtgggttaaggaaaagactcttcaggaaaggatagcattatttttgaaaacatcattcatcaaaaatgactccttatgtttgaaaatatctgcagggctcctttatttgtaagtaggtagtgtaaggacacagagatagagacctttttttaggctaaaataattctttttttttcatactttaagttttagggtacatgtgcacaatgtgcaggttagttacatatgtatacatgtgccatgcgggtgtgctgcacccattaactcgtcatttagcattaagtatatctcctaatgctatccctccccactccccgcaccccagaacagtccccagagtgtgatgttccccttcctttgtccatatgttctcattgttcaattcccatctatgagtgagaacatgtggtgtttggtttcttgttcttgcgatagtttactgagaatcatgatttccaacttcatccatgtccctacaaagaacatgaactcatcattttttatggctgcatatcattccatggtgtatatgtgccacattttcttaatccagtctatcattgttggacatttgggttggttccaagtctttgctattgtgaatagtgccacaataaacatacgtgtgcatgtgtctttatagtagcatgatttatagtcctttgggtatatacccagtaatgggatggctgggtcaaatggtatttctagtcctagatccctgaagaatcgccacactgacttccacaatggttgaactagtttacagtcccatcaacagtgcaaaagtgttcctatttctccacatcctctccagcacctgttgtttcctgactttttaatgattgccattctaactggtgtgagatggtgtctcattgtggttttggtttgcatttctctgatggccagtgatggtgagcattttttcatgtgttctttggttgcataaatgtcttctctgagaagtgtctgttcatgtccttcgcccactttttgatggggttgtttttttcttgtaaatttgtttgagttcattgtagattctggatattagccctttgtcagatgagtagattgcaaaaatttcctcccattgtgtaggctgcctgttcactctgatggtagtttcttctgctgtgcagaagctctttagtttaattagatcccatttgtcaattttggcttttgttgccattgcttttggtgttttagacatgaagtccttgcccatgcctatgtcctgaatggtaatgcctaggttttcttctaggatttttatggttttaggtctaacgtttaagtctttaatccatcttgaattaatttttgtataagttgtaaggaagggatacagtttcagctttctacatatggctagccagttttcccagcaccatttattaaatagggaatcctttccccattgcttgtttttctcaggtttctcaaagatcagatagttgtagatatgaagcattatttctgagggctctgctctgttccattgatctatatctctgttttggtaccagtaccatgctgttttggtaccagtaccatgctgttttggttactgtagccttgtagtttgaagtcaggtagtgtgatgcctccagctttgttcttttgggttaggattgactcggcaatgcgggctctttttgggttccatatgaactttaaaatagttttttccaattctgtgaagaaagtcattggtagcttgatggggatggcattgaatctataaattaccttgggcagtatggccattttcacgatattgattcttcctacccatgagcatggaatgttcttccatttgtttgtatcctcttttatttcattgagcagtggtttgtagttctccttgaagaggtccttcatgtcccttgtaagttggattcccaggtattttattctctttgaagcaattgtgaatgggagttcactcatgatttggctgtctgttattggtgtataagaatgcttgtgatttttgcacattgattttgtatcctgagactttgctgaagttgtttatcagctaagggagattttgggctgagacaatggggttttctagatatacaatcatgtcatctgcaaacagggacaatttgacttcctcttttcctaattgaataccctttatttccttctcctgcctaattgccctggccagaacttccaacactatgttgaataggagtggtgagagagggcatccctgtcttgtgccagttttcaaagggaatgcttccagtttttgcccattcagtatgatattggctgtgggtttgtcatagatagctcttattattttgagatacgtcccatcaatacctaatttatggagagtttttagcatgaagcattgttgaattttgtcaaaggccttttctgcatctattgagataatcatgtggtttttgtctttcgttctgtttacatgctggattacatttattgatttgcatatattgaaccagtcttgcatcccagggatgaagcccacttgatcatggtggataagctttttgatgtgctgctggattcgttttgccagtattttattgaggatttttgcatcaatgttcatcaaggatattggtctaaaattctcttttttggttgtgtctctgtcaggctttggtatcaggatgacgctggcctcataaaatgagttagggaggattccctctttttctattgattggaatagtttcagaaggaatggtaccaattcctccttgtacctctggtagaattcggctgtgaatccatctggtcctggactctttttggttggtaagctattgactattgccacaatttcagagcctgctattggtctattcagagattcaacttcttcctggtttaatcttgggagggtgtatgtgtcgaggaatttatccatttcttctagattttctagtttatttgcatagaggtgtttgtagtattctctgatggtagtttgtatttctgtgggattggtggtgatttcacctttatcattttttattgtgtctatttgattcttctctcttttcttctttattagtcttgctagcggtctatcaattttgttgatcctttcagaaaaccagctcctggattcattaattttttgaagggttttttgtgtctctatttccttcagttctactctgattttagttacttcttgccttctgctagcttttgaatgtgtttgctcttgcttttctagttcttttaactgtgatgttagggtgtcaattttggatctttcctgctttctcttgtgggcatttaatgctataaatttcactctacacactgctttgaatgtgtcccagagattcttgtatattgtgtctttgctatcattggtttcaaagaacatccttatttctgccttcattttgttatgtacccagtagtcattcaggagcaggttgttcagtttccatgtagttgagtggttttgagtgagtttcttaatcctgagttctagtttgattgcactgtagtttgagagacagtttgttataatttctgttcttttacatttgctgaggagagctttacttcctgttccaaaatgtggtcaattttggaacaggtgtggtgcggtgctgaaaagaatgtatattctgttgatttggggtggagagttctgtagatgtctattaggtctgcttggtgcacagctgagttcaattcctggatatccttgctaactttctgtctggttgatctgtctaatgttgacagtggggtgttaaagtctcccattattattgtgtgggagtctaagtctctatgtaggtcactcaggacttgctttatgaatctgggtgctcctgtattgggtgcatatatatttaagacagttagctcttcttgttgaattgatcccttcaccattatgtaatggccttctttgtctcttttgatctttgttggtttaaagtctgttttatcagagactaggattgcaacccctgcctttttttgttttccatttgcttggtagatcttcctccatccttttattttgagcctatgtgtgtctctgcacgtgagatgggtttcctgaatacagcacactgatgggtcttgactctttatccaatttgccagtctgtgtcttttaattggagcatttagtccatttacatttaaagttaatattgttatgtgtgaatttgatcctgtcattttgatgttagctggttattttgctcgttagttgatacagtttcttcctagcctcgatggtctttacaatttggcatgattttgcagtggctggtaccggttgttcctttccatgtttagtgcttccttcaggagctcttttagggcaggcctggtggtgacaaaatcactcagcatttgcttatctgcaaagtattttatttctccttcacttatgaagcttagtttggctggatatgaaattctgggttgaaaattcttttctttaagaatgttgaatattggcccccactgtcttctggcttgtagagtttctgctgagagatcagctgttagtctgatgggcttccctttgtgggtaacccgacctttctctctggctgcccttaacattttttccttcatttcaactttggtgaatctgacaattatgtgtcttggagttgctcttctcgaggagtatctttgtggcattctctgtatttcctgaatctgaatgttggcctgccttgctagattggggaagttctcctggataatatcctgcagagtgttttccaacttggttccattctccccgtcactttcaggtacacagtgagatgaagatctggtcttttcacatagtcccatatttcttggaggctttgttcatttctttttgttctttttctctaaacttcccttctcgcttcatttcattcatttcgtcttccatcactgataccctttcttccagttgatcgcatcggctcctgaggcttctgcattcttcacgtagttctcgagccttggctttcagctccatcagctcctttaagcacttctctgtattggttattctagttatacattcttctaaatttttttcaaagttttcaacttctttgcctttggtttgaatttcctcctgtagcttggagtagtttgatcgtctgaagccttcttctctcaactcgtcaaagtcattctccgtccagctttgttccattgctggtgaggagctgcgttcctttggaggaggagaggcactctgctttttagagtttccagtttttctgctctgttttttccccatctttgtggttttatctacttttggtctttgatgatggtgatgtacagatgggtttttggtgtggatgtcctttctgtttgttagttttccttctaacagacaggaccctcagctgcaggtgtgttggagtttgctagaggtccactccagactcggtttgcctgggtaccagcagcggtggctgcagaacagcggattttcatgaaccgcgaatgctgctgtctgatcgttcctctggaagttttgtctcagaggagtacccggccgtgtgaggtgtcagtctgcccctacttgggggtgcctcccagttaggctgctccggggtcaggggtcagggacccacttgaggaggcagtctgcccattctcagatctccagctgcgtgctgggagaaccactgctctcttcaaagctgtcagacagggacatttaagtctgcagaggttactgctgtctttttgtttgtctgtgccctgcctccagaggtgaagcctacagaggcaggcaggcctccttgagctgtggtgggctctacccagttggagcttcccggctgctttgtttacctaagcaagcttgggtaatggcgggcgcccctcccccagcctcgctgccgccttgcagtttgatctcagactgctgtcctagcaatcagcgagactccgtgggcgtaggaccctctgatccaagtgcgggatataatctcctggtgagccgttttttaagcccctcggaaaagcgcagtattagggtgggagcgacccgattttccaggtgccgtctgtcacccctttctttgactaggaaagggaactccctgaccctttgcacttcccgagtgaggcaatgcctcgccctgcttcggctcgcgcacggtgcactgcatccactgtcctgcgcccactgtctggcactccctagtgagatgaacccagtacctcagatggaaatgcagaaatcacccgtcttctgcgtcgctcacgctgggagctgtagaccagagctgttcctattcggccatcttggctgcttccccaataaaatcaataattcttaatttactcttaaacagagattgtcatgctttatgtgagttaaatttccagaaagttgacaagtgcctccaattatctccttaaatcacatttgacataaatcttccaaaatacactatttatttacacatctttttttaaagttataaacattcagtattgcattgcatagaagtaaaaattcttggtttgatttctattttctttcctttgcctgattcaagaaatcatcaggtacttctcctgctgtccacagagtgatccatacagttctttccttacccctttccctatgctgaacaacaggtaagcaaacacaaagggtttttacaggttacgcctgtactcccaactactcaggaggctgaggcaggataattgcttgacccagggaggcgaagattgcagtgagcctagatggcgccactgcactccagcctgggtgacacagcgagaatccatcaaggaaaaaaatacaaaaatttgctgggtgtagtggtgtgcacctgtagttccaggtattcgagaggctgaggtgggaggattgcttgagcctgggaggttgagggctgcagtgagctgtgattgtgccactgcactccttcctgcctgggtgacacagtgagaccctgtcacatggatggaaggaagggagggagggagggagggaaaagaaaggaaaggaaaaaagtaaagagaaaagaaaagaaagagggaaggaaggacggaaggaaggaaatgatactatttattcatctcctgatttaaaatatatacatatatatacatacttcctaaggctgagtgcactggcttacgcctataatcccagtactttgggagaccgaggcaggtggatcacttgaggtcaggagttcaagatcagtctggccaacatggtgaaaccccgtcactactaaaaatacaaaaaattagcttggcatggtggtgcgcacttgtaatcccagctacttgggagactgagctgagacaggagaatcgcttgaaaccgggaggcagaggttgcagcaagccaagactgccaccgtactccagcccagacaacagagcgagactttgtctcaaaaaaaaatatatatatatatatatctatacacacacatatatatacacacacacactcacacacacacactctctctctctcacactcacttcctaaaggcctgagaaaaagagaagactgatctcctcaaaagtatgtggttaactgaattcaaaactaaatttttttaactattctatttatctaactgatcaaaattaatttggtggtttcatatttaactttataaaataaactgagttttaatttaaaaaaatttgtttcacttaacattctgattagacttactcccatttgccactactcactaattttaatctcatagctgaatataaatttataagcacttttatccctctcctgtttaaaagctttatatgtttcaatgtgtacatcatcatttccctttactaaacagataatcattactgtctaccacagtgaagattcggtttacatatactacaagtttctttggggggaagaaaaagttgtatggaaactaacaaatttggttaactccttgccatcaaacaaatccagtgtttttaatagttcttcttattagaaaatttctccttgaacatctatattccaaatattccttattctgcccaggaatgataaaagaaataatcaatctctgacaaactgataaactaaagcatataaaacaaatgacctcagacttaacacctttgaaagacccattctcaaataactgcaaatttccaatttaaccactttcattttctaatttagtgccatctttaagttcttcgtatccctcagactatgacaccctaaatatatgtcctacaaaaaccttaatcagtgaaaaacagtattaatttgtggccacttaaggagaagcaactccattctaaattatccaagctcaaggcatctctttttgcccctaatttttgctggcctaagcaatactactttacaaacaggcctggtacctaaacacggtaaaaggctgagaaaatgactgggaaaccaaatcccagttcactcagtctacaaggcagcaccactgttctggagtgttcctaattatatacagctagtgggcaggcatagtggaaagggctagaactctgtgaggatgaatgcaaggcatttcagaaagactggctagaatcctcactccaattaggcaataccaccagtggctgggcaccccactatagatggaggctggggaaactcacccaccacatcctaactttgtctctaactttgttctagatagccatgtatatgtagtaaattgtatcatttacttatattaaaataactatcaggttttttgcctgttatcagctgtggggtcttcatgtcaatcacatctttgtctcattgtggcaactttgtagattattgattacctcattagcctatatgtctaccaaaacatggctggaaaacaaaactttaaaaattgaaatcttacctaggttaccatatttcctgctactctggaaaacttagagggttcagattttaaatcagtaattataatattgtgattacatggttttaaaatgtcttatttttgttagccgctcctccacttgcactgagttgggatattaacacagaggatatttctttggtgtctaggcaaaaacacagaacaaactgagttcatatctcagttctgccactgacaagttatgtcatcttaaataacataatcttatccatttcatccaatccacccaatggaggataaaatatttatttcacaaaattactacagtacaaaaaaaaatgttggtaaaaaacttcaatatttcactcacttaccatagtgtcatatcctaccagctttctcatatcttaactaccactttatctcctctctaacctcctgagattctgatttaatctgtttagggtagggctccccacatgacggctatgcagcaagcatggagaacactacctattctttgatcaccccatttccttacactctctcttttctttccagactgtgccctgttagtaaccccttgaactgtctctcagcagcatccttaaattccctatagccccatccttctaagacactcattcattaaaacccaaaccctccatatcaaggccataatgcattctactgcacagcagagcacactaccataggaaggcccacaaaccaggattaattacactatactttcccaattaccaattttagctgggccctcaacaatttttctctcttggacagctctttctttcattgccctcactataccccccacaaaactactgtaaaccttgatgaaacagtaaagtttattaattctattaaatttctacacttgaatatgtatttttaatattctacattgacaaaatggaaaatatgcataaagcacttccccacatatcaaagaacaacaataatctgaaaaaaagcagttgtgtgactgagctgcaagctaaataaactacaaggctcttttcaaagaacatcatttttacttgaagaataactaacagaaaactaaggttacacagacttgggtatttgacagacattttctcaaaaaggaaccaagtgaacctgtcatttcaaggaaaacaaaaggcagtacttgttaccagtgataaaactatctgttacatgatctcaacagcttccaatacttgcagttcaatactctactttgtaagacagctcacaaacacaagaaaagttaaataatgatattatttaaataggaaataaactatattatgtttggaaatgcacgaggcaacacttgattaactgtccaaagaactggactgtgaagaaattgcctatatacaaaatatgaggaaaaagagaaatttacttgggcgatagctgtcaagaatggctctacacaggcataaaatccaagttgggacttgaaaaactggtaggatttagatttaaaaaaaaaaaaacagtgagcaaggcatcctaggaagtttgcaatacaggtatatttttttctaaaagaaatattattttcaggtatatttttaataatgtataatgtattcattcaaactctcaggtaatattagaagatccttaaaggaagaggccacatattacaattctctgctatctgagcacaggatcaaatttaacatgttgaactatttggttggaaaaataagatttacacagggaagaagcagaatagtaataatggaagtcctaagttaaatcccagctcttgtacttacctaggttgccttgggtaatttagtaaacctcactgattcaaactcaaatacacctactttgaggatcaccctacaaacatcctaactaaaagaaccacagataactaatgatcagagatgaaataagactttgtgttcctgtttttatgctgaccttgttgtttttcaagttattttcaaacaattgatgcatttttatctttcatttaccaaaaggaatttatatacaccaggaagatgatacatattgtatacaattacattactcaaagaactctaggctgggcacactgctgtaatcccagcactttgggaagctgaggtgggcggatcgcttgagcccagaagttggagaccagcctgggcaacatggcgacaccttgtctctacaaaaaattagttgggcatggtggtgcatacctatagtcccagctactctgcaggctgaggtgggaggatcacctgagcccaggaggtcgaggctcgagtgagccatgatcgcactactacaatccaggctgggtgacagagtgagaccttatctcaaaagaaaaaaaaaaaaaactctctttaaaatgtttcaatacagcagacagatttttaaatattttctgtataatacactgttacctatattatcgaaatttaacccacaatggcattataatatcagatgtaattccaatttattcttcttcagatattctaaaatatctgaatttttatgcattcttcctctttctatctatttacttcacattcctccagccaccatgatattatcttctcttttctacaaatacacacatacatacactcctcccctcattcctacatccttattgagataactacagccactagagggcaataagtatacaaagatcagtgtacctatttatgatgatgaacttatctatatgattcacatagtaataaacctaaaaagtatatcatcacaaaccctgaaacacaggcaattagacttgaatatgcaaaatatatatttcaaactcaaaaattatcctgcagagttcacagaagcatataatgatgttcaaaaaaggaattccattttctcagcatgcattcattaaaaaaaattagccgaattcctttatatgtgcatagtaatattagaaattaggattgcttaataccatcctcagaccaaagaagagaaaaggcagaaaaaaaaaaacacacagtaaggtataaatcacagagtgggtaaaaaagtgagaaatgattacttccaactctttcactaccacaatcaagaaaacaataaactgaagagcaaagaggatttaccaaccctttcttctattgaaaagcaagcaaaaattttacaagtatatttttgggggaggagaacagtgatggtagagatatacaaagccttcagttcttttctcacaattaagaatgcagaaggaagagaagttaacagttactaatctttaagaggtaattttaccatttttaaaaagaatacatttaaatgaacttatttagtttatatttacttacattgacattacaaaacggcaacacttatataaggctaacattttcagcaaaccataattttcttaccctcattggatgtatatcagcataaggaggttttccttcagccatttctatagaagtaatgccaagggaccagatgtcggccacacagttatagcctatttcttgaatcacctcaggagccatccaaaatggagttcctattacagtattgcgttttgccattgtatcctgcaataatgttacatagccataaatgctactacaaaagcacaaaggaaatctgtatgccaaacatacttttaaaaaatgttaaaacctccaatgccacagattatatcagaaattgactattttgctaaaatttcaactagttatgacatacttaggaattccgaattctgaaaataaccaagagtccacaggtaacttatccacactaccatcattaaacacagtcattaaagatagtgctacaatgataaaagctacagaaatgagctacgtagcttcccttttagaacatttaagcattttgattataagatatattttcacattcaatcaccctaaattataaattaaataatactcaaatttggctcaattatggttccttctccacaaaaattaaaaaactacacatttctttccattccccctcaaaaagtaattgaagtttagttataatcaaatctgaacaaattagccaagtgtttagaaaaccattaaagttaacttactgttaactgaccagccactccaaaatctgccaattttgcatgtccttctgtattgaggagaatatttccagcttttatatctctgtgtatttttctcataaagtgcaaatattctagtcctttcaatgtagatttaagaatggttgcaatttcatcttctattaactggaaagaaatatttttaaaaccataattaaaatgccacgttagataaaatcttacgaaagagcactagtaacaagtatgtctttccgtgtgtgtgtgtgtgtttttttttaagagaccccactctgttgcccaggctacagtgcagtggtgtgatgatagctcactgcagcctaaaattcctgggctcaaggcatgctcccacctcagcttcccgagtagctagaactacaggcacatgccaacccaataggctaacttatttttatttttgtagagatggggatctcgctatgttgcccgggctggtcttgaactctttgcttcaaacaattctccttcctcagcttcccaaagtgttgggattataggtgtgagccaccatgcctagccacaagtacttctttctaatgaccgctaaacctccaggaaaatgctaaaggggtaaataatcgagaacctcttcttcccacaataagctttcttattacacattttactaatgaaaggatgatcaaatttctctctttaagattatcagtatcagcagggcgtggtggctcacacctgtaatcccagcactttgggaggctgaggcgagcagatcacttgaggtcaggagttcaaaaccagcctggcccacatggtgaaacctcgtctctactaaaaatacaaaaattagccaggcgtgatggcgtgcacttgtaatcccagctactcaggaggctgaggcaggagagtcacttgaacctgggaggcagaggttgcagtgagctgagatcacatcactgcatgccagcctgggcgacacagcgagactccatctcaaaaaaaaaaaaaaattatcagtatcattcctaaagcaaacaacatatctcaagaatcagcctgatataaggaatcataatagtgatttcccacatcttctaatactgggagggcactatcacagctaatatctgttctgaaaaagtaaattcagatacttcccctgagatatttcagattcttgatgaaaatgaaaccaacagctttacataaaggaaagtaaatgagggagggaggcttgcaatgaatcttctgcgagaagctcctacaccaatgccactcctaacccttccaagttctggacttctgacctaatattgagaactcagaagaaaaaacgtcagagaaagattaggaaaatggaaacacaagcaaagactatcagaggagggaaaaaggggagagtagagaaggccgaggaagagacggatgggaaagaaagaaaatcttcttaacagttgtagcagtagagccactgctatctgtaccaggcaatgtgctaagagttatgcatgcattctctcatttattcttaaaacaaccttgtaaggtagtgtgatattatgaaatcacaggaaatatttggtctttgtaggttcttggcacaaaatctcctaagaccctgtgaattgactgagtgagtgagaagttgaatcaagatattttatctttgttttctcaccctctcacaagagtgagaggggctgtcttttgtcattcataataagctcctttcaaccataccagaatttatactgatcaggtgactcttggtgggagcctagatagcttcaggatgggagctggttgccgaaaaaaccaaccaagtgattagatgtttggaaatttctgcctgacccctgacttacgggagggctgcaaggagagagggggtagagatttagttaagcacaaatgtccaaagacttaatcaatcatgcctatgtaacagaatcaaccataaaaattctaaatgattagggactgctctcaagcttatattctatctataagcaacgggataatttgatagaaaataggataacacaggaaaatgtctgtgaaaattgctatgaggacaacaatagagagctactgatagagaacgactgagaagctactttagattgacattcaagaaggcccaaaagacattttactgaagtctaaatgatataatggggccaaccatgtgaatggctatctgggaacatacactccacaaaaaggaaaaaaaaagattaaaatatcttgattcaacttctcaaattttctaaaacactgaagaaaagagaacacttccacactcattttaagaggcattattctgatatcaaagccagacaaagttaccacaaaacaactaagaccaatatcccttatgaacattgatacaaaaatcctcaacaaaatatagcacactcacttcaacaggattgtaacaggttatacactatgaccaactggaatgtattcctggaatgcaaggttgattcaacatacaaaatcgaacaatgcaatacaccaccttaacagaatggagaagaaaccacatgatcatttcaaatgaaaacagaaaaagcatttgattaaatttaacttcttttcataaaacacacaactaatatgaatagaaggaaactatctcaccatagtaaaagccatatacaaaaaacccaaagtaaatgtcatactcaaagcagtaagactgaaagcttttccacaaagatcaggaacaatgaaaggatgctattaggttggtgcaaaagtaatcgcagtttttgccattttttttttaaagtaatggcaaaaaccgaaattacttttgcaccagcctaatacttctgttacatatagtactggaggttctagacagagcaattagggaagaaaaacaaataaaggcatccaaactggaaaaaaagaagtaaaattatctctgttcacagatgatatgatcatatatgtagaaaattctaaagattccacaaaaaaaacctattagaactaataaatagggatggagacaagacggctgaataggaacagctccagtctaaagctcccagcgtgagcattgcagaagacacatgatttctgcatttccaactgaggtaccagattcatctcactggggagtatcggaaagtgggtgcaagacagtgggtacagtgcactgagcatgagctgaagcagggcggggcatcacctcacctgggaagtgcaaggggtcagggaattccctttcctagtcaaagaaaggggtgacagatggcacctggaaaatcaggtcactcccaccctaatactgtgcttttccaatggtcttagcaaacggcacaccaggagattatatcccgcgcctggcttggagggtcctacacccatggagcctcgctcactgctagcacaacagtgtgagatcaaactgcaatgcggcagcgaggctgggggaggggcgcctgccattgcccaggcttgagtaggtaaacaaagcagccaggaagctcaaactgggtgcagcccaccacagctcaaggaggctggcctacctctgtagactccacctctgggggcagggcatagccaaacaaggcagcagaaacgtctgcagacttaaatgtccctgtctgacatctttgaagagagtagtggttctcccagcacacagctggagatctgagaacagacagactgcctcctcaagtgggtcactgacccccaagtagcctaactgggaggcagccccaagtaggggcagactgacacctcacacagcccggtactcctctgagacaaaacttccagaggaacgatcaggcagcaacatttgctgttcaccaatatccactgttctgcagcctccattgctcatacccaggcaaacagagtctggagtggacctccagcaaactccaacagacctgcagctgagggtcctgacagaaggaaaactaacaaacagaaaggacatccacaccaaaaccccatctgtacatcaccatcatcaaagaccaaaggtagataaaaccacaaagatgcagaaaaaacagagcagaaaaactggaaactctaaaaataagagtgcctctcctcctccaaaggaacacagctcctcaccagcaatggaacaaagctagacagagagtgactttgacaagctgagagaagaaggcttctgatgatcgaactactccgagctaaaggagaagtacgaacccaggcaaagaagttaaaaaccttgaaaaaaaaattagacaaatggctaactagaataaccaatgcagagaagtccttaaaggacctgatggagctgaaaaccaaggcacgagaactacgtgacaaatgcacaagcctcagtagccgattcaatcaactggaagaaagggtatcagtgatggaagatcaaatgaatgaaatgaagtgagaagagaagtttagagaaaaaagaataaaaagaaatgaacaaagcctccaagaaatatgggactaggtgaaaagaccaaatctatgtctgattggtgtacctgaaagtgatggggagaatgaaaccaagttggaaaacactccgcaggatatcatccaggagaacttcctcaacctaccaaggcaggctaccattgaaattcaggaaatacagagaacgccacaaagatactcctcaagaagagcaactccaagacacataattgtcagattcaccaaagttgaaatgaaggaaaaaatgttaacagtagccagagagaaaggtcgggttacccacaaagggaagcccatcagactgacagctgatctctcggcagaaactctacaagccagaagacaggggggccaatagtcaagattcttaaagaaaagaattttcaacccagaatttcatatccagccaaactaagcttcataagtgaaggagaaataaaatactttacagacaagcaaaggctgagagattttgtcaccaccaggcctgccctaaaagagctcttgaaggaagcaataaacatggaaaggaacaaccagtaccagccactgcaaaaacatgccaaattgtaagaccatgaatgctaggaagaaactgtatcaactaacgagcaaaataaccagctaacatcataatgacaggatcaaattcacacataacaatattaaccttaaacgtaaatggactaaatgctccaattaaaagacacagactggcaaaattggatacagagtcaagacccatcagtgtgctgtattcaggaaacccatctcacgagcagagacacacataggctcaaaataaaaggatggaggaagatctaccaagcaaatggaaaacaaaaaaaggcaggggttgcaatcctagtctctgataaaacagacgttaaaccaacaaagatcaaaagagacaaagaaggccattacataatggtaaagggatcaattcaacaagaagagctaactatcctaaatatatatgcacccaatacaggagcacccagattcataaagcaagtcctgactgacctacaaagagacttagactcccacacaataataatgggagactttaacaccccactgtcaacattagacagatcaacaagacagaaagttaacaaggatatccaggaattgaactcagctgtgcaccaagcggacctaatagacatctacagaactctccaccccaaatcaacagaatatacattcttttcagcaccacaccacacctattacaaaattgaccacatagttggaagtaaagcactcctcagcaaatgtaaaagaacagaaattataacaaactgtctctcagactacagtgcaatcaaactagaactcaggattaagaaactcactcaaaaccgctcaactacatggaaactgaacaacctgctcctaaatgactactgggtacataacgaaatgaaggcagaaataaagatgttctttgaaaccaacaagaacaaagacacaacataccagaatctccgggacacattcaaagcagtgtgtagagggaaatttatagcactaaatacccaaaagagaaagcaggaaagatctaaaattgacaccctaacatcacaattaaaagaactagaaaagcaagagcaaacacattcaaaagctagcagaaggcaagaaataactaagatcagagcagaactgaaggagatagagacacaaaaaacccttcaaaaaattaatgaatctaggaactggttttttgaaaagagcaacaaaatagaccgctagcaagactaatagaaaagagagaagaatcaaatagaagcaataaaaaaatgataaaggtgatatcaccaccgatcccatagaaatacagactaccatcagagaatactataaacacctctacgcaaataaactagaaaatctagaagaaatggataaattccttgacacatacaccctcccaagactaaaccaggaagaagttgaatctctgaatagaacaataacaggctctgaaattgaggcaataattaatagcttaccaaccaaaaaaactccaggaccaaaaggattcacagctgaattctaccagaggtacaaggaggagctggtatcattccttctgaaactattccaatcaatagaaaaagagggaatcctccctaactcattttatgaggccagcatcatcctgataccaaagcctggcagagacacaacaaaaaaaaaagagaattttagaccaatatccctgatgaacatcgatgcaaaaatcctcaataaaatactgacaaaccgaatccagcagcacatcaaaaagcttatccaccatgatcaagttggattcatccctgggatgcaaggctggttcaacatacgcaaatgaataaacataatccagcatataaacagaaccaaagacaaaaaccacatgattatctcaatagatgcagaaaaggcctttgacaaaattcaacaacctacatgctacaaactctcaataaattaggtattgatgggatgtatctcaaaataataggagctatctatgacaaacccacagccagtatcatactgaatgggcaaaaactggaagcattccctttgaaaactggcacaagacagggatgccctctctcaccgctcctattcaacatagtgttgaaagttctggtcagggcaattaggcaggagaaggaaattaagggtattcaattaggaaaagaggaagtcaaattgcccctgtctgcagatgacatgattggatatctagaaaaccccatattgtctcagcccaaaatctccttaagccaacaggcaacttcagcaaagtctcaggatacaaagtcaatgtgcaaaaatcataagcatttttatacaccaataacagacaaacagagagacaaatcatgagtgaactaccattcacaattgcttcaaagagaataaaatgcctaggaatccaacttacaagggacatgaaggacctctttaaggagaactataaaccactgctcaatgaaataaaagaggatacaaacaaatgcaagaacattccatgctcatgggtaggaagaatcaatatcgtgaaaatggccatactgtccaaggtaatttatagattcaatgccatccccatcaagctaccaatgactttcttcacagaattggaaaaaactattttaaagttcatatggaacccaaaaagagcccgcactgccaagtcaatcctaagccaaaggaacaaagctggaggcatcacactacctgacttcaaatacactacaaggctatagtaaccaaaacagcatggtactggtaccaaaacagagaaacagaccaatggaacagaacagagccctcagaaataatgccgcatatctacaactacctgatctttgacaaacctgacaaaaacaacaaatggggaaaggattccctatttaataaatggtgctgggaaaactggccagccatatgaagaaagctgaaactggatcccttccttacaccttatacaaaaattaattcaagatggattaaagacttacatgttagacctaaaaccagaaaaaccctagaagaaaacctaggcaataccattcaggacataggcatgggtaaggacttcatgtctaaaacaccaaaagcaatggcaacgaaagccaaaattgacaaatgggatctaattaaactaaagagcttctgcacagcagaagaaactaccatcagagtgaacaggcaacctacagaatgggagaaaatttttgcaatctactcatctgacaaagggctaatatccagaatctacaatgaactcaaacaaatttacaagaaaaaaaaaacaaccccatcaaaaagtgggcaaaggatatgaacagacacttctcaaaagaagacacttatgcagccaaaagacccatgaaaacatgctcatcatcactgaccatcagagaaatgcaaatcaaaaccacaatgagataccatctcacaccagttagaatggcaatcattaaaaagtcaggaaacaacaagcgctggagaggatgtggagaaataggaacacttttacactgttgatgggactgtaaactagttcaaccattgtggaagtcggtgtggcgattcctcagggatctagaactagaaataccatttgacccagccatcccattactgggtatatacccaaaggattataaaacatactgctataaagacacatgcacacgtatgtttactgtggcactattcacaatagcaaagacttggaaccaacccaaatgtccaacaatgatagactggattaagaaaatgtggcgcatatacaccatggaatactatgcagccataaaaaatgatgagttcatgttctttgtagggacatggatgaagctggaaaccatcattctcagcaaactattgcaaggacaaaaaaaaacaaacaccgcatgttctcactcataggtggaaattgaacaatgagaacacatggacacaggaaggggaacatcacacaccggggcctgttgtggggtgtggggagtggggagcgatagcattaggagatatacttgacattaaatgatgagttaatgggtgcagtacactaacatggcacatgtatacatatgtaactaacctgcatgttgtgcacatgtaccctaaaacttaaagtataataaaaaaagaactaataaataaattcaacaaagtagcagtatacaaaatcaacccaagaaaatcagatatatttttatacattaccaatgagcaatctgaaaaggaaactacaaaaaaaattctatttacaatagaaatagaatttctttattttaaagaataaaatacttaggaattaatttcaccaaggaggtgaaatatctgtacaatgaaaactacaaaacactgctgaaaaaaaattttaggacattaataaataaaaacctatcatatcttcatagataagaaaatttaatgtttttaagatgcccatgctacccaaagcaacctacagattcaatgtaatccctatcaaaatcccaatgatgtttattgcagaaatagaaaaacttatcctaaaatttgtatgaaatctcaaggggccccaaaacaacactgaaaatagaagaacaaagctaaaattctcatagttcctgatttcaaaacttattacaaagctatagtaatcaaaacaatgtgatattggcataaacacagacagatagatgggaggaacagagtagaaaacccagaaataacccttgtatatataatcaaattattttcaacaagagtgtcaagaacattcaataggaaatgaacagtattttcaagaaacagtgctggcacaactggatatccgtgtgctaaagaataagtagaatccttacctagcaccatatacaaaaattaattgaaaatgaatcaaagacctaaacataagacctaaaactataccactcttgggaaaaaataaaacagggcaaaaacctcatgataccagatttggtaatgatttctcagatacgaccaaaaaggcacagagaacacaagaataaaacagacaaattggacttcatgaaaattaaaaaaaaaaacctgtgcatcccaagacaatatcaacagagtaaaaagacaacccacagaatgggagaaaacatttaaaaattacgtatctgataagacattaatatacagaatatatagagaactcctaaaacttaacaataaaaaaatcaaattcaaaaatgggtaaaggactcgtatggacatttctccaaaggtatacaaatggccaagaggcacgtggaaagatcctcaacatcaccaatcataagacaaatataaatcaaaaacataatgagataccacttcacacccattatgacggctattatcaaaagacagaaaagaacaaatgttggcaaagaagtagagaaattggaaactttgtgtatagctaatgggaatgtaaaatggtacagcctctgtggaaaatagtatgaagattcctttaaaagttaaacataaaattaccttttgacccagcaattccacttttgggtaaatactcaaaagaattaaatgcagggtctcaaagaggtgtttttgaacaagtttcacctcacgatgaacgtacacccatgttcatagtagcattattcacaatggctaaaaagtggaagcaacccaaatgtcattcgacagacaaatgaataagtaaaatgtggtagaaacatacaatggaattttattcagccttaaaagggaaggcaattctgcaatatgctacaacatggctgaaccttgagtacattatgctaaatgaagtaagtcggtcacaaaaaaaggcaactaatgtatgatcctgcttatatgaaatactcagagttaccaaaatcacacatctagatagacagtagaacagtggttgccaggggccgaggtagcacacaatggacagttagtgcttaatgggtacagagtttcagtcttacaagatgaaaagagttagggggatggataatggggatgcttacacaactttataaatgtatttaatgccactgaactgcacacttaaaaatggctaagatggcaaattttgtttatgtgtatcttggcacaataaaaataaaactgagggggggaaatgccttgattcaagaaaaagctcaccatatttgagttgaataaagaaggctgaagtttaatgcaccagaagactagctctagatgagatctgagagacaggcaaggaccagatcatgtaaggctttcctggccataggtaagcagtctggattatctgaaaattccggtacttccaggaatttattctctccttcagactagatggtctgacttgacagcgcagagaaagcaagcaccatactctaaagctgcaccatccaacagagtaaccactaaccacacatggctcctaaacatttgaaacgtgggtattctaatttcagttatgctataaatgtaaaatatacaccaaagatcaaggcttagtacaaaaagaatgcaagctattttgttaaaaattcacatactgattacccactaaatatttacatattatgttatgatattaatatattaatgttgaacatataaaatgttaatgtttaatatagtaagtattaaatatggtatttcatattatataatattgttatttattaatatgtgtgatacattatgaaagttaatttcactttttttaatgtggctactcaaaaatttaaaattacatgtggcttgtgtttcttttggacagtactgcactagaaagggtccacaagaatgttttgtgaacactttgttcactgatgtatccacaatgcttggaactatgcctggcgtacagatagcacttgataaataatgaatgaatgggtacagacttgtcgatacaaaaagaaaggagacaccttcatctgatgttcccaatctttctaagttagtggtgtgcagccaaatgtgggggagtgggaggtaggagtgtgtttagggccaccataatggaccactacagacggtgggcaaggtggtggtgctgtcatgtgcacctagcttttctcgtctgtcctcatcctccactctttgtataaagactaaaaagcttggggtgttaataaaggcagcatcagcccataaaattgtgtcttatttagttacttcagtacagacctttttagttacctagacttcaatttttatctcttaacattctatttccaaccaataagtcactaattttctattaactctgatttgttatctctgctcctgtaccctatatatcactgctctactaaagaatgttcagaattaaataaactgactgtacttcagggtcttaggatctgtctgattttaatgctataaagccactggacaaatccacagcaagtctaaaggaggattttccagggatattatactaattcatgaactgtctggctttgctcaatgacttgaaagggtcattccaactctatgattctatgttatcaaagtatcttcatgtagaggcaatcttcactaaataaaattctcactcatttgggcatcaatctatgtgttcatttagtaaatatattcttgactggctctaccacagcgctgatactcttcaaggtgctggatatacacggacagggaaactgataatcccagtcctaatgagcagacaagaatatctgagggcataacctgaatttggctctgaactgttaaaggtggagagtgcagatctgaagtttatacagcctctctttcattatgcttccctttggtaacaaatccctcccactacttcagagagtcaatgtcttcccattcgcttcatatcctccttaatcaaaaaatgatgcaatatccagtcattcatacaagtacatgaatagagcttaatttaaatttattttaacaacccaatttagtattaaggcttataagcagtatctgtactttaagacttttaaattcaattatgaaatgaaaggttcctatccctcaataaaatcactttaaacaacaataaacaggtggagaaatattttctagaacgtaaaggcatactgttgtcttaaatttttatatttatttacagtttataaaaagtattttatgtgatttctctacttaagtaagtaagcagaaacacttattattattccttttaacagacgaggaaacgaattcagagaaattaaatggactaccgaatgtcatacaactactaagtagcaaacctcacatttcttcaacaatcaatattacttccatcccaccactgccagatgtcacaaacataaatatatgaattagtctaatataagaaaaactggggccaggcacggtggctcacgcctgtaatcccagcactttggaaggccgaggcaggtggatcacaaggtcaggagatcgagaccatcctggctaacacagtgaaaccccgtctctaccaaaagtacaaaaaaattagccaggtgtggtggcaggcaccagtagtcccggctgctcgggaggctgaggcaggagaatggcatgaacccgggaggtggagcttgtagtgagcatagatcacaccactgcactccagcctgggtgacagagcgagactccgtctcaaaaaaaaaaaaaaaaaaagaaaaactgggggttttgagacttgttctaagtgtgatattcaaaatatctgacagtcattaaagcaaatgtctaattagaacagttgccaaccacaataccaaccaatcaaaacagctaccagtggtaaacaacagtaagaacagataccagccataaataggcagtaaaaaaaaatcatccctgaatatcagacagagtacctgccccagctcagcattcaaatttaaattattttcaatggtatgccagccaaacaaaacaaatatacctgttaatgaattgtagaagtaagcacactcacctggccaataatttttttgattcctttcaccctgagtacattaatgggtggctttatgagcattttattgaaaacagatgcttaattctgctaaaacaaatatataaatcaaagatttaaacattttaaaaatacttagaagaaaaccaaagtaagtttcaaatcactaagcaggaaagatagtttctaatcaaaaaaagcaaagaaagaattatgagaacttattagttttgtctacacaaaaacttaaaatacataagcttagaatacatacaaggttctacataaccttagaaaactcagaaaaatagccagttatggtggcacaggcctatagtctcagctacccagcagactgaggtgggaggatcacatgagcccaggagttcgttcaagtccaggctgggcaacatagtgaggcctcgtctctaaaaaaaactaaataaatttttaaaaagaaaaaaatagtcatagcaagatattaatatatataattatttatttagaacatagagctcatataaaaccttcagaaaaacaataaaatctcaataaataaacaggcctaagaaatgaatataaaattcacaaaactaaaaaaaagagctaattaacatacatggaaactactaaactgctctaattatcaaagaaaggcaaattaaaacaataaagtaccaaatataaaattaccccaggggttacaatattgctgtgaataacagcacatatataaccagaatgtaaaccagagtgtaaaagtgacataagaattcagaagtattttccaagaagcactaggaaacattgatccactgaaaaattatttattgagcacctactctagatttaatttttttttaaatctctaacctaacctcatggggctccaatctagcaggaaatacagacttagagactcataaatgatcataaaaagctctttcaaagtgaaacataaccaaaaaggagtgcaattaattaggaacagatagaggaagtggcattaaaatcaagctttaaataaaaaaagtagctcactatccagagaaaggaaagactactaatagagtaactcaaataatgaactaaagaatagaaatataacaattataaaatggcactcagaaaccaagtaaggcccagttttcttccttccactacaataagaaaaatgacaaaaagcgatagtccaaatttcagccttgtaccaaaacggagacaaatcttagcaaatttggaagataaatgtttacttggtctcttttaaatatcaatggtgccaaatgaactttggacaagagaaatatctgtatcaaggtttaaggtactctacaagtattgtgtgtcactaatggaaaaggaggagagtggaaggaaataagaacgtatacttagtggacaccatacagcaggttctgatctagatgtttatatcatgctcatttcatgtcatttggacatatgttaacctttttgttattaaaaaataaagaagttgacagtcattttcctagatagatggagttttgttttcaaataatctctagctgttttaacaaatttcattcacatataagcacagccaattaccaaaagtagctagatttttatttggcaacaaagagaactacttctttccattgtgacataaaatttaaagcagtacctttctcatatctgtaagacttttcatgaggctggataggtccatacccaactatttcaaaatggtcagatttatactgaaaacaccaagagggagaaaacacatgagagaggatctgcttcatatagaagaaggtaatgtaagaattcagctccaagatggaaaagcgttagatccattctcaaatcacagctagcacttccttcagtggtatctgttaagaatcccttaaaacaaacaaaaaaaaaattgtggacaccattgattggaatacaaaatattttatcaacagaatacttcatttgtggatttaattaggttatcctcaatacattacagatttcatttcatttaggtcactatacaaatggtgcgatgtcatttttaaatcctctgaatcacattttatagtctgttttgctgtatttttttaaagaagggtggtagagagataataaaccatgaatgaaatactcagcaatcagggataaaagtaagacatttatagctgagctaatacgttaaaagatggaagtctacatctggtttcaattggtatgaattcactggcaaatttaagaagaatttcattgtacgaaaacaaaaagatggttttgataggctttagtcctctggttacttttgtttctttagtcacatgattagtataataatatgatacatttaatatgtcactgtgtatatggttttgataaaaatacacccaccaacttgtctcaagggcacatgcacaaatggttttaaaatacatatactgccttaatgtttttagatcagtaaaaatgaattcaagtgaggttttaagttcacacaaaattaagaattttaattttctaataagtctttcgcaatgttagctaaacaccttttggacataattacttatgcatataaaatgacgcattaattctacatttaatacctattagatagtaaggatacaaaaaattagacatacgccccccttttcaaatgccataaatagataagtacaggtacttcatttaagttttactttcataggcacttgcataaggtcttaaaaattgatcgaaactcaccaatgtaatccttacacagtcttttaaggcctggatcaaactttgcctctttcaagaaatcaccctatattcctcgagtcaggattaatctatccagtgttaacaatggtgataacaataacagcttgcatttattgagttcttactagtcagccactccacaggtttcatttcatttaacacccaaacagaactgtagaaggtaggcactaacaaggatttactgaaagtctgttacatgatcactgtcttcatgacactcagaattttgtgggaagggaataggaacaattaattacaatactaagcgatgcctgcaacaacaggattagcaataggagcactccaggacagcagttcttaaagctgattatgcataagaaccagtactcttaaaatccaaaccatctaatacaacatttaaggccttgaatgatacaattcctgccagcctcgaccatctaccttaccattctaccactcaggaagggcttcacagagatgacttttgagctgactctaaaagagtgaacaaagtttatcaggtgaccaaagagggaaagatacataaggcatgtgcaaaggcactgagcataaaaatacataaagtgcattaccaatgaatagttctttgtgtttgaacatagtgtgtatggtaaaatagtgcaaaatgggaagtcagattagggccaaactgttttacacacccacatatttttaagtggaaagatgacatgatcatatctgaacttttaggaagaaaactctgacagcaggctctcagacaaagactaaaaggaggaaaacagaagtggagaatttaataataaaataattcgtaaaaataacagtagtagtagtaggagtaatagtaacaggtctataaccttgcttagaatcctaagagagacttgtgtggtagaattaatagtgaacaccttaagcaaaattattcagaagacgaagaagagtcagaccatgcagagaagccaaaaggtgccaaaagcaaaatccatctttcctaatttacgtaggtcttaaagactatctagagtcttttcccacaactgaaagtgccttagcactaaagaatcatatattgcttagttagcatcctctcagttctcccaaaaaattgttataaaaaatgaacatgtcctttgactcagtaattccatttcattaatacatccaatgaccacaacacaaatatgccaatacctatgtacaaaagttccctgcagctttgagtgtagcaataaaacattaaaaagttagaagtcactttcatccaggagactgaaaaaaatacattctgttacacacacataagacctatatgtactggtatgggaaggtatctaaaatatatcagaagttgaaaatgaaaaacggtaaggtataaaacatcacatatggtattaatcccttgtgtaaaacaagatatacatacatatgtggtgaaagaatccacaagaaattaactgacacaacctcaaggaagtaaaattgaagggtagatgtgaagacattaacttcctcttttgtacccttttgtattatttgaaatttttacaatgtgctcgtgttatgtttttctctataatttatataattaaaaggaatgaagcagttaaaagtacactctagttaaaagtacagataattatgcaacgcaattttagaagatctccatataatactgttaaaattagaaatttgccatccaaggaactaactttccatttcctggaatattaacttatatatatttcttgatttcctaagattaaacaaaagtaagataagacacaatgatcttttcatatgttttttctaatgctgaagaatatccactatttcaacaaacatcatacaattcttaaatcacttgtgatttaaaactaaataccactttttaaagtttttaccttaacagtaaaaagtggcaatttacatttgtatagaactttacaggttacagagtcctctgacacttaccatgtttttttcccacaagaaaacactgatgtaggtaaagcaagtaatatgatattagatcaatttcaggattaggaaactgaagctgagaggagttacacaatgtacccagggtcacagagctaataagtaacaacccaagcactgaagcttggtcttcctgctccacatccaaagggctttccactaaaccacatcactccaaataaccactgttacagcgtgctatggggtcaggcttctgacagggaagaagggctcactacagatctggcaatgacaggcagtctgcctgcagaggaatgtacaatacaaaaataaagtgtatgaaggtgggcctgactgacgaaagggaagtagaactgggagaaatgccaagaagaataacaaaggtgaaaactgggcaacttaccaataagggaagccaaggaaatacctttgtaaacttaatttacttagttaaggtagaagggatagtctatgtaggggactatatattataatgtggaaaaatcataaagtgtttataattcaatcaaaagatttagaaaagatgtaatgaagcgtgatgtgtatgctgtatttaatcagagattacaatgtggcagcacatgactgccatgaaaattttaatggtctaatcccacaatgcatatcctgttaatgttgtggcttagaactttaagaggcaagtgtgaagtacactcagaactcatactcactccatgggacacccgaaataaggagcaaaaagtatcactttctacacaaaagaactcattctcctaagattctagtacagcactgatcattagtacccactcagagtcagaaaatccttgtaagaacgggccagggacaccagaaataacaccaggatcaagccatcctggactaaagagaaccatgggtctttccactgagtactttccaggaaaatcctttagcaaacatttactgctgacctagcaggaacaggctccttgagaaacatcaaccttactgtcccttactgtgacagaaggaaaaaagagatgggacccaaaagctttgactcaatgtcaccagatgtatcttccacagtttaagattcattttgtgagctattttagagtttttaaattattgtcctttattcctggtgtgttttgaagtttagtaaatatatagaaacatctattattttttgccagtctagcactcatttgctcttctcctgctaaacatattctgatttccctctaggaaatcactacttctccattctcagaccatgtatttctggtagtcaagtctaccctagctccagattgaacatatgacctaggtctaagtcaattactaaatcacattgtaatggccacaatgatttgctcagagaagggcacatgacccacgcagaggcacaagattatcactcttttctgctggatttcaactagaaagatataacccagggaactgctggcagacatcttgtaactgagggaagagcttgtgtgagtgaggccaagaaagaggtatcagaacaaaaacatgaattcaagtaattcctctcaccctgaatcaagccatgcacaaactaactttgcaatgagcaagggttatgtgaacaaataaattccctctttggcttgagctggcttaggctgggttttctgtaacttataaccaaaagttgaaactgattcagtaaacttgaagtaaataccaaacaggagaagttcttggaaaagaggtttgtgtaaagcacaaaccactgactaactccagaaatgctagaggttattccagatgtataacagctttagatgtctgatctattttctactttctggcccatcaaaaaaagggatacaataattggcggaaagaaaagtagaataaacatattttttaaaaggaacatgcacagtcatttttttaaagtctcctgctgccttcattttcctactagcacctcccctagctagtttgtcattgtattcatttgcatttgatttctcattttacggaactctcagatgtttcagtttccattcatttttatggcataatcaactcacacaatagttaccaaaaccctttacagaaaaatcaatggtttcgagaaacttggtgaatatgtagcaatttctgaaatacttaaatctcaaaagtaatacttaagcttacatgtaagattttatctgatcattcatcaagcttcatattccaacttcttaacaaccaaaatttctccctgccccctcctcctctcctaggataaagaatacacacattaaattggggctcccaggtatcctggatgaggaaaatactctgggaaaaacagcacagctgttcagttaactcccttctaccctcacaaatctatttcattccacccccctaaagaagagacttgaaaatataaaatatccaaggttataaacaataaaaaaagttatggaatttgtccagaaaaacacaaatcttctgttcaacacaaagtacatacattaggaaaaataactagaatattttaaccattattcgagagggcagagagaggttgtctttcatgaaatctggattgcacatgtctggcaaggaaaaaaaagattaataatctatcacaaagccccacaactagtgattcaaaatgaaagctttcactacttacaccatatgtaaatatatatatatacaagctgcttataatcccttgatctgcagagaaagagaactgatactctactgtgaaaatggtcagtgggtacacattttaaaatcctttcccacatgaaaagattcctgaaaaagagatcagaagacaacagaaaagcactcaatatatatggagttgtaaatccagtatgaaccagtatctattacacaaaggaggaacatgcaacaaagtgattaggaaagtcaaacatgaattaatctaataacacaaaggtaaatataaaccccaaagagcactttattgaacagaaatccacacatatcaaaaagatgtctactattaacaatgacatatcaagcttttaaactccaaattaatcttaataatcaataatgcaaacttgatatgcccttaccaagaaaaaaaagtttgaagaagcacttaacatcaaggcagaacatatacatatttttaaaatataacaaaccaaatgtttaccataaaggctattacatgcaaggtattgattctaagggcacttggataaaatatgctagtatattttgaatagccactgcttgactcttttatttatttggttatttggttatttatgtatttatatgtttattgaggtggagtctcactctgtcacccatgctggagtgcagtggcgagatctaggctcactgcaacctctgcctcctgggttcaagtgattctcatgcctcagtctcccggcagctaggattacaggcgcatgccaacacaccaggccaatttttgtatttttagtagagacggggtttctctatgtcagccaggttggtctcaaactcctgagcccaagtgatctccccgcctcagcctcccaaagtgctgggattacaggtgtgagccacctcgcccagccaccaccgtttgattctattaaagaaactaacactgtacctaaaaatgtgaggtctatgttatggaatgtatactttcttcattaacaacaataattcaaagtaccaaagtaccaatggtgaatactaagattctatccttggttctatagttctctgcattcttctacccaaatacatctggtagatgatcatgtccaaaatgcaaagacacttttatctacctaagtgagatgataggataaggatgacaatgtcaaaagcaaatatatatagggccacttatgtgccaggtgttattctttaaatacatgtaatctttataacaactcatatcttgtcccatatatcagatgaagaaattaagtcacagagaagtttaaaaacttgcccaagttcagagaggtagtatgtagcagagccaggattcaaatcctggcagtctggctccacatttcatgttctcagctcaattctagtcttcagctataattccaatcctttctttccatatcactacttaacctccatatgtttccatttctcatctggaaaatgggtcattaatagttcttacctcatagagttctccaatcctcatgaggattaaatgccataatatacataatgtatttagaaaagtacctggcacataaaagtaatacatatttctgttgttattttatctaccaaatgtctgtcactggagttgagaaccattgttctaaaactgtaacagtgagaatttaccaagcagaatagtcttaatgtgcccttacactggtaactaaagaaaactggactttctcaattattttcaatataaaacaagtccaccaccagccttcaagaaaatatacaaatcatttaagagttgctatcttcagtctggaatttcttctccattattttgtgttccctcacacccacccaatattacagaaatagatctcatcctgataaaggtatatagtgaaaatgtctcttatatatcaaactgaatgtttatacaacttttaagacataaaggccaggtgtggtggctcatatctgtaatcccagcactttgcgaggccgaggtgggtggatcacctgaggtcaggagttcaagaccagcctggccacatggtgaaaccccatctctactaaaaatagaaaattagccaggcatagtggtgcatgcctgtaatcccagctacccgggaggctgaggcacgagaactgcttgaacatgggaagcagaggttgcagtgggccaagatagtgccactgcactccagcctgaacaacagggcaagactccgtctcaaaaaaaaaaaaaaaaaaaaaaacacctgtgtggtattttaatgtaattctcatctatacagctggatgctgggtactcttgaatcagaatactactcccagagtttggcttcacgaaagagctacaaagtgtgaagactgagggaactacaaccatcctttaacccagggactaacgctgatcgacatttaaatatgcttctattaatagttttctgttgtgacaacactcttgcacaggccccactatacaattgtgccaagatttctcaaaagtacagaaggaggaggaaaaccactggatagagcctagagtacatacatattcaacgacaggagattatcaaattactctttgaagtagttgtactaatttaaattcctaagagtatgatagcatatagagtatatataaggcacaagtgagtacaataaatttggaagcatttctatggagaaggtcataaccaagagcagacaaagaagtgatctaccaagtaaaccccagaaggactccaagcttagaaccatagggtagggagagcaagagggaaagggagttcactttttcacggaagctgtaaagaagaaaatggaacaagagttggctccttgaccccagtctgcccctgctcccatgtacatgcagattacatgaattctggcatttatccccagatcaaaaaaaaggggaaagggttcctctctaaagaaattcagggggccgggcgcagtggctcacgcctgcaatcctagcactttgggaggccgaggtgggaggatcacgaggtcaggagatcaagaccatcctggctaacatgatgaaactccgtctctactaaaaacaataccaaaaaattagccaggcgtggtggcagtagcctgtagtcccagctactcgggaggctgaggcaggagaatggtgtgaacccgggaggcagagcttgcagtaagccgagatggcgccactgcactccagcctgggcgacagagtgagactccgtctcaaaaaaaaaaaaaaaaaaaattcaataaaaacctgttgtaggccctttcccttaaaagctagctcccaacccattcaccctaatattatgcctgtcagtcaaaaggcattgtcccagtgcttacggtgagacctgagcagccttccagtcccaagggcaagaccagaataaataaaacaaggaaatccataaccctagaagaaacagaaatgattcaggaaacagacaatagcatttatttaaaaaacgtattattcttaaagcaatttcaaaagcttttctatccatgtcagcatcaatatgttatgaaaaaggaataatcaaaagagttcttgtaattaaaatataactgctaaaataaaaagttcagttagaaaagtcagaaaataaagcaaaataaagcaccccgcctcctccaaaaggcaaaaagacaaaaagagacggataatctaagaggaaaaacaaattcaggagattcaacctttcaataaagaaaatagaaattttccaaagctgaagacagacaattgtttatatattaaaaggaactactgaatgctgagcataactaataaaatggactcacatctaggcacattcttgtgaaatatcagaaacgtcaagataaaaagaaaactccagaaatttccagagggggaaaaaacctacaaataagtaagactctgacagccattagcaacactagatgttagaagataaatggaggaaagtctcaaagctctgagagaaaattattttcactgtaaaattctacgtaggctatcaaccaagcataaaagcaaaataaagacattttcagatatgcaaaggctcaaataataattgaccccttattcttgtatcatgaagaagacagtttaggaagaatacaaaacaaaggtaaaaaccaagaaaacaggaaatatcctttttttaatggtggcactaacccaagagtcaagtgaaaagaaattctaaggatacggctataaaacagacctcaaagcaataagtccacattagaacaagaaatcaggaagctccaaagaaatctcaaagaagaatcacatacatttcaggaaataaatacactgagtaagaagctcaaagatattaccaaagggataaaagatgcatacattgcttttttcaaaataacaaaaaaagaaaaaactcccagaaacagaaaattatataacaacatgatcctaacatagagccatcaacctaaaatgtggcaatgattttgagtaattaattgtgagaaaagtaaatccatttagaccacatgctgggaacattcttctttgggtaacctaggggtacaacactggatatttagagacagaaataaaatttgagcatatcattgtttcctcttccaagatgttctttgccctctcttctctgacttactcatttattcattcactctctcaatatttactgagcacccatcctaggagctaaagataaaacagtgaacgaaaaaagaaaaacacctgcccttttgaagcttatattcaataactcctattctttcaagaatctgctaaagcaggagtccccaacccctgggtactggtccatggcccgttgggaactgggccacatagcagcaggtgagtggcgggtgggcaagcattactgcctgagctccacctcctcctgtcagatcagcagcagcattagattctcataggagaataaaccctattgtgaactgcacatgcaaggaatctaggttatgcactccttatgagaatctaatacctgatgatctgaagtggaacagtttcatcctgaaactatcacccccatccgtagaaaaattgtcttccatgaaaccagtccctggtgccaaaaaggtcgaggaccactgtgctaacggattctctcaccaatgaaactttttctaaattgttaggctatgtgcatctccttttttcctcctaaagaactctaactctttgcaaaacagaatttggctttttacatacctattacctcatctagtgtgtgaagaatgcaagacagcaacatttattagttatttgtacttctagtgaacagcactgggcctaaatcaataaatgtgttttgaacctttccattcaaccaaaatgtaaataaaactgctgtattcatccactctcacactgctataaagaactacctgagactgggtaatttagaagaaaagagatttgattgactcacagttccacaggctgtacaggaggcatggctggggaggccatggagactcacaatcatgacggaagggcaaaggggaagcaaacaccgaattctcatggcacagcgggagagaggatgaagggggaagtgctacacactctcatgagaactcactatcacaagaacagccgggggaaatctgcacccatgatccaatcacctccaatccacctccatgatccaatcacctcccaccaggtccctccccgaacactggggattacaattcaacatgagatttgggtgggaacgtagagctaaaccatatcaactgacaagtaaaatgtaaagcactaggcaaatgttacttattacttaacagatgaggacactgaagtccttgtcagttgaatgatttgctacagaccacaagactagtctgtagaagaaccaaaactaaaacccatattgctgaaagcctgggttcatgccgtttctcctatactaggttgaatgaaaacaagtagtcaaatcaaaaaatgggcctaaatgggaaagaataaccttaggcattttcttagaatgtttttaagtatacaataaacatccaaaatatagactctatttcttccatatgtcaagacatagctttacaattatgtaaagatcatttggaaagcctctaatcaaaaatctaacctatcttttaagagcttcaatttcacagagttatgcatttctactctgcagtatatgtttgaaatgcataaatgtttcgagatgtttaacggcatttaatataatataaattggtttttaaaaaatttcttcatgggaaaccttcaaaacttactaccacaaatatactaaagtttttattcttttaaaacttgaaaacacttgactcctcaaaaaaaaaaagctcatattaccttacacaaacaacaacaaaaagctttttcatgagtcacagaaggcctatggttaaaattatcaagatacacatttttaaaattaagcaaaaaattaaacagacacatatataacttttgtaaaaatcagggaactaatgaaacattctggtatttcacacatgccaaggttactagtaagcatactttttatggcttgtctttggtatatgaccatatttgttcagcaatccacattattaataccgaatagtagccatgcaaattataacttatccacaaaaatataacactgaataaagaggtagggtaattttatattcacaggacaagaagccaaaaaattggctgtttcagctcaacatttatcaaaggcttgtaggtgccaaaagctattctaggcacttggaatatttcaagattaatatattaaaactcctgggcaactgcaactactcttctcccaaacactaaaagctgactaattaaatgtaactcccatatataggataccatgactgggttatctacaaagaagtttcatcaaacttaaaagatagtttaaaatactgtgaaaaaatcagttactgaatgtgaatgatacgaggacttgagctgtgtttgtgagtctgatcacaaaaatcagaaatttaagtcacatatactattttatagagccccaaatacttaaaaaccaaaaggactcaatgaatactaatcttacagtgatttttactcataatgtaaccagaagagtcagagaaacttttatcacccattagaatacaggagttttacctttttcctaattctagtaccactaccattaattaccacaattcgttaccagctcaagtgccaactctgtgatctggcccatgttgagtaagaatcagcacttaaatagacaaaatctctaccctttacaactcagactcagttacaatcactggaatatgtctaattaacccacaacttaattctatgccttcatcttttcctacatgtttcccaaaggaaaagtatagatcagattttgaaggtccttctttaatatctatgctgacaatcagataatttgttttatgacttttaaaatatgtgaagtactcatataactattagcaaactgtcaagcaataaaacataaaaaaaaggccaacagaaacaacaaacagcaaagaacaggcacaaaaagaacatgaaacagccaatacaaatatgaaaagatagcctacctaatagtcaaaataaacatcatcatcacagtaaaaatagcatttattgtgctttctttatgtaagagtgaatatgcaataaacacccaattaattaatcaatgaattactaaatagacaacaaactacctgagaaaataagcaaattttcaaataagaggtaacattttcagctgggccttcatggatgcaaatacactaggcaaagactgggggtagggataacactaaaagaagtgcagaggatgaggcaagggcatacatataatcaccaaaatatgaagccagttcttattctaggagccagttctcattgtaacactgaactggaaagtacctgataaaacagtgacaaggtatgaaactgtacaggaagaaaggaggtaatacataaactctgtttatacatcaggctaaaaaatttgaacttaaatgttttatttaaaagacatgtaacttaattggacttgctctttcctgtgccttttattttcaattttcaaggaaatatttgttcaaaaatagacaatagtcaataattcagaatcaagaacgctttacccctaataagatttctttcaaagacaagcacaattccacacacaaaataaatatgttacttaggtggttctccaagacttactactcttaaaacaaattaaaaatttagaatctattgtcaactccctaaatcatcacataattttgtttcttctctataataaatgaagctcactatatataaatatgtacaaatagaatatgcaaattatacatagacaatatccagaaagtttctaataatgtaatctaaactgtccattactctgagaaagcttactattaatgtggttaatatatgtagtatatacataatcaaatgaattataaagttaaggtctcacatcagaacaggattatgctgtcacaacaacatccatctgggtccacttgagcaccaatccaaccttgttctcaacctatattttatagtttttattaacaatttaaagataagcacaaaacaatttcagtaatcatgtttttatatctttttttagatttataaaggttaaagctgtcaataaagttttacatccacagatcatacatgaattcatttaagtgaatataataataagaaaagtcaattcaagggctctacctgacatacccaaatgaacaagagtaaaaagagatgcaagcaaatgagtaaaccagtatctgagatactcactccaaggaaaaggccccaaacataaagcatgagtttcaaggacaagataaaactcctaaaaagagattaagagaaataaatggggtactaggcaagaataatacaaaatgtcacacaggattattaactggattacaaaaaaggtacatgaatagaaaataaataagcaaatgactaattagtaaaatcaaggaacagggtcagaggagtaacaacggtaaaaactgctatggtgaataacaaaaatatatgagatacagcattcttagatactagcattagccgactagaaaatataacagcaacaaaagatcattcacattagcagtaaaaatgacaaagctcctagaagcaaatcaaatttaaaacgtatataattttctttttcttttttttttagatggagtttcactctttcgcctaggctagactgcagtggcgcaatctcagctcattgcaacctctgccccgcaggttcaagagattctcctgcctcagcctccagagtagctgggattataggcacctgccagcacacccagctaatttttttgtatttttagtagagacagagttttgccgtgttggccaggctggtctcaaactcctgacctcaggtgatccacctgccttggcctccagaagtgccaggattacaggcgtgagccaccgcacccggccgaatgattttcaagaggatttaaaaatgcatttaaatacaaaaaagaagaactgaacacaaagatattctatgatcatgcattggaaaatattagttaacacaaattatgagttaaatgtaattccaatcacaaacccagcaagactttttgtggagcttgacaacttattctaaaacttatgtgaggccagacacggtggctcatgcctctaatctcaacactttagatgaccgggtggatcaccccacgtcaggagttccagaccagcctggccaacgtggcgaaaccctatctctactaaaaatataaaaattagctgggtgtgatagtgggtgcttataatcccagctactagggaggatgaggcacaagaatcacttgaatctgggaggcggaagttgcagtgagccaagatcacgccattgcactccagcctggggaacaagaacgaaactccgactcaaaataaaataaaaaataaaataaataaataaataaaacttataagagagatcaaggaaaacaaagacaagggaattgcatcccaaacatcaagcacgccaccatataattaagaacatatttctggatccgggagccaagatggctgaataggaacagctctggtctacagctcccagcgtgagcgacgcagaagacgggtgatttctgcatttccatctgaggtaccaggttcatctcactagagagtgccagacagtgggcgcaggacagtgggtgcagcgcaccgtgtgcgagcctaagcagggcgaggcattgcctcactcgggaagcgcaaggggttcagggagttccctttcctagtcaaagaaaggggtgacagagggcacctggaaaatcgggtcactcccacccgaatactgcgcttttccgacgcgcttaaaaaacggttcaccaggagattatatcccacacctggctcggagggtcctacgcccaaggagtctcactgattgctagcacagcagtctgagatcaaactgcaaggcagcggcgaggctgggggaggggcgcccgccattgcccaagcttgcttaggtaaacaaagcagccgggaagctccaactgggtggagcccaccacagctcaaggaggcctgcctgcctctgtaggctccacctctgggggcagggcacagacaaacaaaaagacagcagtaacctctgcagacttaaatgtccctgtctgaacagctttgaagacagcagtggttctcccagcacgcagctggagatctgagaacgggcagactgcctcctcaagtgggtccctgacccctgaccctggagcagcctaactgggaggcacccccaagtaggggcagactgacacctcacacggccgggtactcctctgagacaaaacttccagaggaacgatcagacagcagcattcgcggttcatgaaaatccgctgttctgcagccaccgctgctggtacccaggcaaacagagtctgtagtggacctctagcaaactccaacacacctgcagctgagggtcctgtctgttagaaggaaaactaacaaacagaaaggacatccacaccaaaaacccatctgtacatcaccatcatcaaagaccaaaagtagataaaaccacaaagatggggaaaaaacagagcagaaaaactggaaactctaaaaagcagagtgcctctcctcctccaaaggaacgcagctcctcaccagcaacggaacaaagctggacggagaatgactttgacgagttgagagaagaaggcttcagacaatcaaactactccaagctacaggaggaaattcaaaccaaaggcaaagaagttgaaaactttgaaaaaaatttagacgaatgtataactagaataaccaatacagagaagtgcttaaaggagctgatggagctgaaagccaaggctcgagaactacgtgaagaatgcagaagcctcaggagccgatgcgatcaactggaagaaagggtatcagtgatggaagacgaaataaatgaaatgaagcgagaagggaagtttagagaaaaagaacaaaaagaaatgaacaaagcctccaagaaatatgggactatgtgaaaagaccagatcttcgtctcactggtgtacctgaaagtgacggggagaatggaaccaagttggaaaacactctgcaggatattatccaggagaacttccccaatctagcaaggcaggccaacattcagattcaggaaatacagagaacgccacaaagatactcctcgagaagagcaactccaagacacataattgtcagattcaccaaagttaaaatgaaggaaaaaatgttaagggcagccagagagaaaggtcgggttacccacaaagggaagcccatcagactaacagctgatctctcagcagaaactctacaagccagaagacagtgggggccaatattcaagattattaaagaaaagaatttttaaaccagaatttcatatccagccaaactaagcttcataagtgaaggagaaataaaatacttaacagacaagcaaaggctgagagattttgtcaccaccaggcgtgccctaaaagagctcctgaaggaagcaataaacatggaaaggaacaaccggtaccagccactgcaaaatcatgccaaattgtaaagaccatcgaggctaggaagaaacggtatcaactaatgagcaaaataaccagctaacatcataatgacaggatcaaattcacatataacaatattaactttaaatgtaaatggactaaatgctccaattaaaagatacagactggcaaattggataaagagtcaagacccatcagtgtgctgtattcaggaaacccatctcacaagcagagacacacaaaggctcaaaataaaaggatggaggaagatctaccaagcaaatggaaaacaaaaaaaggcaggggttgcaatcctagtctctgataaaacagactttaaaccaacaaagatcaaaagagacaaagaaggccattacataatggtagagggatcaattcaacaagaagagctaactatcctaaacatatatgcacccaatacaggagcacccagattcataaagcaagtcctgactgacctacatagagacttagactcccacacaataataatgggagactttaacaccccactgtcaacattagacagatcaaccagacagaaagttaacaaggatatccaggaattgaactcagctgtgtaccaagtggacctaatagacatctacagaactctccaccccaaatcaacagaatatacatttttttcagcaccacaccacacctgttccaaaattgaccacatagttggaagtaaagctctcctcagcaaatgtaaaagatcagaaattataacaaactgtctctcagaccacagtacaatcaaactagaactcaggattaagacactcactcaaaaccactcaactacatggaaactgaacaacctgctcctgaatgactactgggtacataatgaaacgaaggcagaaataaagatggtctttaaaaccaatgagaacaaagacacaacataccagaatcgctgggacacattcaaagcagtgtgtagagggaaatttatagcactaaatgcccacaagagaaagcaggaaagatccaaaattgacaccctaacatcacaattaaaagaactagaaaagcaagagcaaacacattcaaaagctagcagaaggcaagaaataactaaaatcgaaccagaactgaaggaaatagagacacaaaagactaatgaatccaggagctggttttttgaaaggatcatcaaaattgatagactgctagcaagactaatgaagaaaagagagaagaatcaaatagaagcaataaaaaatgataaaggggatatcacgaccgatcccacagaaatacaaactaccatcagagaatactacaaacacctctacgcaaataaactagaaaatctagaagaaatggataaattcctcgacacatacaccctcccaagactaaaccaggaagaagttgaatctctgaatagaacaataacaggctctgaaattgtggcaataatcaatagcttaccaaccaaaaagagtccaggaccagatggattcacagccgaattctaccagaggtacaaggaggaactggtaccattccttctgaaactattccaatcaatagaaaaagagggaattctcccaaactcattttatgaggccagcatcatcctgataccaaagccgggcagaaacacaaccaaaaaagagaattttagaccaatatccttgatgaacgttgatgcaaaaatgctcaataaaatactggcaaaacgaatccagcagcacatcaaaaagcttatccaccatgaccaagtgggattcatccctgggatgcaaggctggttcaacatacgcaaatcaataaacgtaatccatcacgtaaacagaaccaacgacaaaaaccatatgattatctcaatagatgcagaaaaggcctttgacaaaattcaacaacgcttcatgctaaaaactctcaataaattatgtatcgatgggacatatctcaaaataataagagctatctatgacaaacccacagccaatatcatactgaatgggcaaaaactggaagcattccctttgaaaactggcacaagacagggatgccctctcaccactcctattcaacacagtgttggaagttctggccagggcaattaggcaggagaaggaaatcaagggtattcaattaggaaaagaggaaggcaaattgtccctgtttgcagatgacatgattggatatctagaaaaccccattgtcttagcccaaaatctccttaagctgataagcaacttcagcaaagtctcaggatacaaaatcaatgtacaaaaatcacaagcattcttatacaccaataacagacaaacagagagccaaatcatgagtgaattcccattcacaattgcttcaaagagaataaaatacctaggaatccaacttacaagggacgtgaaggacctcttcaaggagaactacaaaccactgctcaatgaaataaaagaggatacaaagaaatggaagaacattccatgctcatgggtaggaagaatcaatatcgtgaaaatggccatactgcccaaggtattttatagattcaatgccatccccatcaagctaccaatgactttcttcacagaattggacaaaagtactttaaagttcatatggaaaaaaaaaaaaaagagcccgcatcgccaagtcaatcctaagccaaaagaacaaagctggaggcatcatactacctgacttcaaactatactacaaggctacagtaaccaaaacagcatggtactggtaccaaaacagagatatagatcaatggaacagaacagagccctcagaaataatgcttcatatctacaactatctgatctttgacaaacctgagaaaaacaagcaatggggaaaggattccctatttaataaatggtgctgggaaaactggctagcgacatgtagaaagctgaaactggatcccttccttacactttatacaaaaattaattcaagatggattaaagacttaaacgttagacctaaaaccataacaaccctagaagaaaacctaggcattaccattcaggacataggcatgggcaaggacttcatgtctaaaacaccaaaagcaatggcaacaaaagccaaaattgacaaatgggatctaattaaactaaagaacttctgcacagcaaaagaaactaccatcagagtgaacaggcaacctacaaaatgggagaaaattttcgcaacctactcatctgacaaagggctaatatccagaatctacaatgaactcaaacaaatttacaagaaaaaaacaaccccatcaaaagtgggcgaaggacatgaacagacacttctcaaaagaagacatttatgcagccaaaaaacacatgagaaaatgctcaccatcactggccatcagagaaatgcaaatcaaaaccacaatgagataccatctcacaccagttagaatggcaatcattaaaaagtcaggaaacaacaggtgctggagaggatgtggagaaataggaacacttttacactgttgatgggaatgtaaactagttcaaccattgtggaaggcagtgtggcgattcctcagggatctagaactagaaataccatttgacccagccatctcattactgggtatatacccaaaggactataaatcatgctgctataaagacacatgcacacgtatctttattgcagcactattcacagtagcaaagacttggaaccaacccaaatgtccaacaatgatagactggattaagaaaatgtggcacatatataccatggaatactatgcagccacaaaaaataatgagttcatgtcctttgtagggacatggatgaaattggaaatcatcattctcagtaaagtatcacaagaaccaaaaaaccaaacgctgcatattctcactcataggtgggaactgaacaatgagaacacatggacacaggaaggggaacatcgcactctggggactgttgtggggtggggggtggggggagggatagcattaggagatatacctaatgctaaatgacgagttaatgggtacagcacaccagcatggcacatgtatacatatgtaactaacctgcacattgtgcacatgtaccctaaaacttaaagtataataataattaaaaaaaacatatttctgttgcagaagcaggcaaataaatctctgctagaacagacagaccaaatatagagacaaatatatacataactttagtaggacaggcttataagccagttaaaaagggatagaaaattgtgttaggacaattagatttccacacagaaaaaaaaaaaagtgctgtatacccctatctcctatcatatacagaaataaactccagctagattaaagatgtaggtaaaaagccagcctattgcaagataagagtgacaccatttcaaagcaaaaccaccataatgacaggagtttggctccagcagcaaggtctttaaacaatgcctgtagcatagacaacccctcataaagatgtttatctaacctctccagtggtcatgagtagcaacaaagtctgaggtgtaaccagctgcatatgttttaccaaaaaagcttgctatataaaggatattttcgggagggtggatgtgggaatacaccacctcttggccacccaaaacattatttctgtttgttagtctgtaataaatgtttttttataagaaactggatttgtcagtgtctttcttcagctctcagctcccttagcctttgggggtagctttgcatatgtttgctcatagcagaacagaactgctaataacaaaacttgtactatttgaaagagttccacttctggtagtgataaactagataattcagaccactctcctgcttaaagaactaaaatgtctggagaaaatacatttaaaagtctatgttaaggctaatgaagacacacgagcagtgtattttgtctgaaaacaaaatattaaaaaaagaaaaaagaagaggtaagcctagcaataagggctgcttttccccaagaggcatctatcaattatggaacagaggccaagaggctaataagcagagcagaccttttgactgacttacaagatgagaaggtcaaagactggaaatcaaaacctaccgagaaactgagaagccctataatgccaaaggaccatatcctagatgtaaaggaggatcaaccctcaaaagtacagtcatgtgtcacctgacaacatggatacattctgaaagacatcattaggcaacttcatcattgtgtgaacatcacagagtgtgtttacacaaacctagatggtatagcctattgctcctaggctacaaacctgtgtagcatgttaccgtacagaatgctgtaggcagcagcaacacaatggtaagtattcgtgtatctaaacacatctaaacatagaaaaagtacagtaaaaatacgatactataatcttatgggaccacaattctacatgcagtccatcattgatagaaacatcattatgtagcacataactgtactgaagcccagattcaaattatctctaaccccaattgaattaagtgatccaggattgctagttctagccaccagatagaaacaaaaaccttaagtaaaatacgtcaacattcagaagttcaaataacctctatcacgttttacgcaatgtctagcactctatcaaagatcacaaggcacagacaaaaacaataaaaaacaagagaaacaatataaaatagaaagagacccacaggagattaacatttaaaagattagcagacagaattagactataattaatatgttctaggatatgagcctaggcagcgaagtgagaccctatctcttcaaaaaatcaaaaaaattagccaggcatggtaccacacgactgtggttccagctactcaggaggctgaagtgggaagatcacttgagcccaggaggccggggctatagtgagccatgatcacaccactgcactacagcctgagtgacagagcaagaccctgtctcaaaaataaaaataaaaaataaaaataaattatgttcttggatataaaatacaagatttctggataatatctttaaaaggctaaaaggaatcactaacctagaattctttacccagcaaatatactgttcagaagtgaagtgagggtcagacatggtggctcacatcagtaatcccagcactatgggaagccaaggcaggagaattgcttgagaccaggagttgaagaccagcctgggcaatatagccagaccccatctctacaaaataaaattgttttaattagccaggcatgatggcatgctcctgaagtcctagttactcaggaggctaaggctggaggatcgcttgagcccaggaattcaaggttgcagtgaactgtgatcacaccactgcattctagcctgggcaaaagagcgagaacctgtctcagaaaaaggaaaaaagaaaacatgaagtaaaataacaacattttcaccaaaaaaaaaaaaaaaaaagacattatcatcatacccaccacacataaggaaatactaacagatattcttcagacaactgagaaacacagaaagaaataaagaacaataaaaagcataaatatatgagtaaatataaacatttgcaatacaaaataagaataacaatataaaataacaagaattccatgtgctatttaaaatgtatacagaatttaaagaaacaaagcagatcacaaaaaaaacaacagaccatacaagctcttaaaaacaaattgccatattcttaggaaaagattgtttcatgaccatgaaaacaattactagagtgagttttacacctgtttaatcaaagacgactgttagactcgtcaaatttttgaaagccagtcagtcagtaatagtcatgcttctgaaattcagacaatcaagagttaacactctagtgaacaaaggcctacaacatccagatattttttaaataggatgttacgtatctttatattattaaccttaacaataatggtactctttttggataataaataaatgaagaaaaatgtccttgcactagaaaagaaagatacaaatattcttgagacttaataggagctgtcatcaaggcaacactcagaaacaatatacctacagctcctgatcaatctcttgtgcagctctgggttccttttcatatatggaaattagactcttaccatgccatcccagaacccagggtacctgttgtgtgagcgtaacaactatgttattccaagtgtacaactccccaacatgctcagtggactgtgtcttataacaaagaatatgaatggataaaatctttcctttgataactgacaaagagttttctgaagataatgatctgatccatacctatctttaagaactatagtatgtcttcacagttgtaattattggcaacaagcattaaacttcttggatcaaatacttcatatctactcaaaattgtaacattaacacttaaaactaagaaaatagagatgtttaaaattttccatttcacacactacttcatattcctacctgataactttaaataccaaatgcactgagtttagccctgaaatgagtttaaaacaattctctaactgggatataattactttccactgaagcatttttctgccactcaagaatcatctgatttacataaatgctagttaagcaccatagaaattctaaaatatatcattagcagaatgtcacagatcacttaatctactctgtcaaaacagggattatttcaacttctgtttcacttcccttaaaagaaatcctatttactttcttttctctaacagggaaaaaaaattagtaaaataaacttacagtgtacttcccaaatcaaactttaaaatgattctggttaactacaaattgactgaagtattttttctgaatgtattttactgaaacatggctgacaacatataataatgttactgctacagaattacaaattatttcactgattactcttcctattcaagaaaaaaaggtcactttggtccatacaaattgtccaaataaactagatgtattactagcttaaagtaaacaattttgtaaatagcacttctagttagagttaaaacataaccataaaaagcttttattaaacaatacatttcactaagctaaatttatagaaatatatatatttctatcactttcacacatcctgacaatatttgggaaaataaatacaaaaatgtttttttttaattcagaagtatataatttcttcaaatattccagccataaattataatacataaaatttaagatacgtaaataccatgaatattataaactttaaataaaattctagccataatttatgaaactcacattattaaacaacacacacacacgctgattccaaatgaagaagagaagtaccatggtagtttctctgtgacacaccaaaaattatcctaataaataaattaaacaatcatgtaattcctaaatttgttacagaaagatatgtggctggttctcacacctcctactagatatctttacaccacttaaaaccttttcttttttcatgctattattttctgtgtaacaaaataccaactagtcagattctaaaatatcaatctttagaaatgatattagcaaaacaattttaaaatacttactgtcttgtttcgtaatctaattatgtctgagacagagccagcgccacagtactccataacaatccagaggtctgtattcttaaaataactgccatagtactttacaacatatgggctaaaggaaaatacataaacaattaaatttagttaattcccaaagaaatttttttcttaatcccaatacaaagtattttcaacatttcatactgttccaataagttaaataagtaaatttctattgcacatcaaattctcaatatctggagttcaccaactatgcataattaggctttacttcatggacgaaatttaacaggattacaaaccagaagaggcccaaatgttttgagtgattctgaagaaaataagacttcattttggcaaagaacttactacttaacatgaggaacaaatgaaaatttttccctttaactaaagcattttaaatatgtcttctaaaggattttgcattcagtcaaatattaatcaactcgaaaataatctatatttccatgaggccaaaaagttattttaaattttctttcattctggcttttgaaaattctagagaaaaaaaattataaatttttctgcttaaatttatagaattaaaatattagcaatttaatttctaaactgaggtcttacgtcttccagagcagaataaactatgtttatagccaagctgtcttcaggaagatttagaaagggacaaatgaccatcagcaataatgtatattatggataaactacatatagtgatgtatgagaaatctaacctatctcaaagaggcagaatatcatattcaaaaaatgcatagagatagaaaatacaagacagcagaaactaaataggacacaactttaatgctacaagagctcaaatgaggaaataacattggaatcatccaaagagaactttgtggaagggagtgggatttgaatgagattttgaaagaaaagtttaaactccaaaatgtagatggagaagagggataagaaaattctagaaaagagaaagaccatgaataaaggtacacaaatagaaagggaaaaaccaagtatggcatgtaagaggacaacttgttcaaataaatacttctatctagtaatagctacaatcaaaaacagtagccattttgctgggcacaaatgtaagataaatatgacagaaaaacaaataagcaaaaaaaaaaaaaattgaaagtacaataaaagaacacgtagagactctatcaattgtggaggttaagagaagactgtcagggaagacttctcagtacagcctttaaaattttagctatgctctaacactgaggcagtaataaacagcctaccatccaaaaaaaaaaaccacccaggaccagatggacttagggccaaattctagcagatgtacaaagaagagctggtaccatccctgctgaaactatttcaaaaaattgaggagaaggaaatgctccctaactcatcctatgaagccagcatcattctgataccaaaacctggcagagatacaacaaaaaaagaaaactttaggccaatatccttgatgaacattgatgcaaaagtcgtcaacaaaacattagcaaaccaaatccagtggcacataaaaaacctaactcaccacagtcaagtaggctttctctttgggatgcaagattggttcaacatatacaaatcaataaatgtgattcatcatataaacagaactaaagacaaaaaccacatgattatctcaatagatacagaaaaggctttcgataaaatcagacatccattcatgttaaaaactctcaacaaactaggtattgaaggaacatacctcaaaataataagagccatatatgaaaaacccacagccaacaatcatactgaatgggcataagctggaagcattccccttgaaaagcggcattaagacaaggatggactctctcaccattcctgtttaacatagtattggaagtcctggcaagggcaatcaggcaagagaaagaaataaaggtcatccaaataggaagagaggaagtcaaactacccctgtttgcagatgacatgatcctgtatctagaaaaccccatagcctcagcccaaaagcttctcaggctgataagcaacttcagcaaagtctcaggatacaaaagcaatgtgcaaaaatccctagcattcctatataccaacaacagtcaagccgagagccaaatcgggaactaactcccattcacaactgccacaaaaagaataaactacataggaagacagcaaactagggaggtgaaagatctccacaaagagaactacaaaacactgctcaaagaaatcagagatgacataaagaaatgggaaaacattccatgctcagggatagaaataatcaatatcattaaaatgaggctgggcactgtggctcacgcctgtaaacccagcactttgagaggatcacttgaggtcaggagtttcagatcagcctggccaacacggtgaaacccccatctctactacaaatacaaaattagctgggcatggtggcgcatgcctgtaatcccagttacttaggagggtgaggcaggaaaatcacttgaactcaggaggcggaggttgcagtgagctgagattgtgtcactgcactccagcctgggcaacagagcaagactccatctcaaaaaaataataataaaaaataaaaaaataatatataaacacacacacacaaacacacatcattaaaatggccatactgcccaaagtaatttatagattcaatgctattcttactaaaactactatttgagattcggcacagaactagaaaaaactattttgaaattcatatggaaccaaaaaagagcccgaatagccaaggcaatcctaagcaaaaagaacaaagctggtggcatcacactacccgacttcaaaatacactacagggctacagtaaccaaaacagcatggttatgatacaaaaaaagacatacagacaaatgaaacagaataaagaactcagaaataagaccacacaactacaactatatgatctttgacaaacctgacaataacaggcaatggaaaggaaaaaggattccccattcaataaatggtgctgggataaccagctagccatatgcggaagattgaaactggacccctcccttattatcatgttcaaaaatttaactcaagatggattaaaggcctaaatgtaaaacccaaaaatataaaaaccctggaagacaacctaggcaataccatccaggacataggcaaagatttcacgacaaagacacccaaagcaatcacaacaaaagcaaaaattggcaaatgggatctagtaaaatcaaagagcttctgtacagcaaaagaaactatcaagagagtaaatagataacttacaaaatgaaagaacatttttgaacaaactatgcatccaataaaggtctaatatccagcagctataaggaacttaaacagatctacaagaaaaaaaaaacaaacaaccccattaaaaaatgggcaaaggacatgaacagatacttttcaaaagaagacctacatgtggccagcaagaatatgaaaaaaagttcaacatcactgatcattacagaaatgcaaatcaaaaccacaatgagataccatgttacaccagtcagaatgactattattaaaaagtcaaaaaaaaaaaaacagatgctggcaaggttgtgaagaaaaaggaatgcttatatactgttggtgggagtgtaaattagttcaaccattgtggaagatagtgtggcaattcctcaaagacctagagacctagagacagaaataccattcaacctagcaatctcattactggatatatacccaaaggaatataaattgttctattataaagacacatgcatgcttatgttctttgtaactagcactcttcataatagcaaagacatggcatcaacctaaatgcccatcaatgatagactggataatgaaaatgtggtacatatacacaatggaatactatgcagccacaaaaaagaacaaagtcatgtcctttgcagagacatggatggagctggaggctattgtccttagcaaactaacacaggaacagaaaaccaaatactgcatgttctcacttataactgggagctaaatgatgaggacacatggacacacagagtgaacaacacacactggggcctatcagaaggtggaaggtggaaggagggagaggatcaggaaaaataactaatgggtactaggcttaatacctgggtgataaaataatctgcacaacaaacccccatgacacaagtttacccatgtaacaaacctgcacatgtacctctgaacttaaaataaaagttaaaaataaataaataaataaataataaaaacatcagtcatctaaaaaacaaaagtttaaaattttcccattataattaaattttatattaaaaacaaaggcaataaatacaaaaaaaaataactatgtcttgaagtcaaaggtagaacagagtggttggagctgaagggcctgaattcaaacctgttttatccccactgctactccgttacctcttgcacagacttgctccccactggtctccttgtcttagttttctcccctgttctagtctatgctacatacagttgacaaggtaccttactttaaaacaaaagtaaaacaagctgatcatactgctctcctagttaaacaaaaatactctaacagctctccattacccaaaggaaaagctcttaactgcttcatatcgcatacaagttatttcagagtctaccttgttacccgtatctctgattactctccatctcataccttaaatttccagacacactcagctttgctaggtcttgggaattgaaagtatgtatttggagttcataaatgttcactgaaccatttaagaaaagtgcttgtttacaaacaaatgaaactaaatacagacttagaactgcaacatatgagaaacaaaaaaaaaaattctttacatgtactcctttaaggtatggcgcctatgtggaaacttttatagggagtagcgttcctacacctggctgtgcatgagagccacctgtgacccaagcccacactcctttgaggttctgattcagtaggtttttaaaagctctaccggtgactctgacatagacccagagttaagcttcactctaccagtgaatagactgtatatccttcaggggaaaaaaaaaaaactctctctctctctctttttttttctgaagcagaatctcattctgccacctaggctggagtgcagtggcaccatgtcggctcacagcaatgtctgcctcctgggttcgagtgattctcgtgcctcaacctcccaagtagctgggattacaggcctgtgtcaccacgcccagctaatttttgtagttttggtagagatggggttttgccatgttgaccaggcttgtcttgaactcctggcctcatgtgttctgcctgcctcagcttccaaaagtgctgagactataggtgtgaaccaccatgcccgccaaaaaaaaattctttaaatatgaatgttctcattcaaaattttgaaaagtgttaagtaacaatgaattgacgattatgttcactgaaaagcatacaaaaaaatgtacatttttcttgccatacacactaatcagcaatgctaagggtagaagtgacaactcatgaaaattaggaattctaacctgggcagccacctgaaaacacagccctatctctccataagagtaagtcaagagaaaactttggcaaaacgtaaaattctcttcaaaaaaataattcatggcccatctaacacccacgtaagtagatggatccaagtccaacacctctataacataaaacatggcctcactaactttaacccagcaaagtatttaagcaactagaactaaacagccacatgcattcactgaccctctactcgggccaggcatttcaccagatgttcagtatgcactagtgaaacacacattcacaatttggaccctcataccgaatacactagcatgaatatacaggaattaaggaagtaaactcacaaataaatatgattactaaccatggcaagaaaagaagaaagggtgctataagataaactggctgtgactttattttgtattcaccatttctgcaaataaaattgctcctagttcatatgaaggaatggaatgcattcatattccatggtagcctctgagacttggaaggcactggagtatgtgaaaaacctttgaaagcagataagtgagctttaacaataaaatgtcctttctccactgaactgctgtgaattacaaaatccacagattggaaaagaaagaaatgcttaaactccagagttcatatgtatacagtggccatcctctgacactttctaagtcagcaccttttatactgtaaagcacttattacatcctgcaaggactttgtcattgacttttatctgcctcccccagaagaacagaagctccataaagataggtaccaatctgtctcgctttccattttatcctcagtagctctcttctcctatatacaaactaaagaagcaggccgggcacggtggctcatgcctgtaatcccagcactttgggaggccgaggcaggcgaatcatgaggtcaagagatcgagaccatcctggccaacatggtgaaaccctgtctctactaaaaatacaaaaaaaattagctgggcgtggtggcaggggcctataatcccagctactcaggaggctggggcaggagaatcgcttgaacccgggaggcagaggttgcagagagacgagatcgtgccactgcactcctgcctggcagaagagtgaggctccgcctcaaaaaaaaaaagaaaaattaaaattaaaaaataaagaaagaaagaaaagaaccaacgaataaataaatcacacaaaaaactaagacaggacctaatttaggactctccaagggaataatatttaagctaagatgcaaaacttaacgagaagttagccagataactaagcactaagaactgccctgcaaaggccctgaaagacagaacaaatcacggtcaaagaactgaaagattagcgggcccaggataaagtgagtaaaggatacagtagaacataatggagttgcatatgtaggcagaagcctgaccatgaagggcctcaaaaccaaggtaaagagactgggctttatttgaaatacagaaaaaaaaatcagtgaagaattttaagcagacgaataacatgatgtaaagtttctgtggttgctgaatgaaagctagattgtagggaagcaaatgtgaatacagagagaccaattaaaaagtaatgttagtccatgcagagattatagtaagcatatctttttattttctgtattcttgatgctttggtatctgggaccttgctaaaactgaagcgactgcccctctcagggtaagctaattcctagagacagcaaactaactcccatggaaggatgtctttcatatgcacaccaacctatctaaagcccaaacctccaaccacctctatggttacactctagggtcaacttttcacctgcccaaattgccccagggccaggtaccagacaaccagagaaagccctatgccccagaacccactcaaaatactcaaagtagccaatcctaaacctgtttaccctatctcacctgtcccttcccagggaaaccacacaaacattcttgtccacttcttcccccctctttctctgcctcctaactgactctggtacttccccgtggagcccctgtgacacagcacgcctccttctcttgtgagctgtatatataacaatatatcttttccatagcaatagtctcttgatctgttggcctcatgatatgtgagtaataataaagcatactttttttttttgagacagagtctcgctctgtcgcccaggctagagtgcattggcgcgatctcggctcactgcaacctctgcctcccgggttcaagcgattcgcctgcctcagcctcctgagtagctgggattacaggcacccgccaccatgcccggctaatttttgtatttagtagagatggggtttcaccaggtcaggagttcgagaccagcctgaccaacatggtgaaaccctgtctctactaaagatataaaaaattagccgggcctggtggcatgcacctgtaatcccagctactcaggaggctgaggcaggagaatctcttgaacccgggaggcagaggttgcagtgagccgaggtcgcgccattgcattccagcctgggcaacagggcgagactccatctcaaagaaaaaaaaaaaaaaaaaagcctaccaataggctcagacagttcaagacctgagacttctaaactcaagtctatttccattaacacagatatgcattcaaattcacatttatttatctttttttttaagtaattcaaacaacaaatattcactgaacaagcctactagcagaagctagggagaaaaatggaaaaacattagactagtgacaaagaagaaagggcagtccaggcaatggggaacccctgaagaaatttatataaggaaataatacaatcaaactagcatttaaacattatcctgagcaggattgtcaaggatcaaacatgatgttgttcattctagccagcaagttaactaactacaattatttagatgttctaacatctgtttttaaaccagcatgttgattattaaaggttagggaagaaggggagagagtttcactcaaaacactgtaacactctagtgttatatacaggcaaatctataagatattgcaggtttgattccagaccacctggataaagcaaatatcacaatacagtgagtcacacaaatttttgttttccagaaagaaaccttggatcaggcagattcatagctgaattttgctaaacgtataaagatgagctggtaccaatcctactgaaactattgcaagaaagctgaggaagagagactcctccctaactcattctacgaggccagcatcattctgataccaaaatgtggcagagacaaaatgaaaaagaaaacttcagaccaatatctctgatggacataaatgcaaaaattctcaataaaagacctgcagaccaaatgcagcagtacatcaaaaaactaatccaccacgatcaagtaggctttattgctgggatgtaaggttggttcaatatacacaaatgaataaatgtgatttgccacataaacagaggagattttgcaaaattcttgagggtcctaagatttttggaatgggcaatgaacactggcttcaacttaaagtcatgagaggcatcagcccctaacaagagagtcagcctgtcctttgaagctaagcagtgacttctctctagctaggaaagtcctagatggcatctccttccagtagaaggctgtttcgtctacattgaaaatctgttgcttaatgtagccaccttcatcaattatctcagctacatcttctggataacttgctgcagcttctatttcagcacttgctgcttcatcttgcacttttatgttatggagacagcttctttgtttaagcctcatgaaccaacctctgctagcttcaaacttttgttgcttcctcacgtctctcaaccttcatagaattgaagacagtaagggcattgctcgagattaggctttggcttaagagaatgctgtggctggtttgaacttctatccagaccactcaaactgtctccatatcagcaatgaggctcttccactttcttaccactcatgtgctcactggagtagcacttctaatttccttcaacaacctgtcctttgcattcaagcttggctagctgtttggcacaagaaccctagctttcagcttatttcggctttcaacctgtcttcctcactaagctaaatcatttctagcttttttatttaaagtgagagttgtgtgactctccctttcacttgaacccttacggaccattgtagaattactaattggcctaatttcaatattgtgtctcaaggaataggaaagcctgaggaaaggaagggagatggggcccacggcctagcagtgggacagtcagaacacacacgacatttatcaatttagttcaccatcttacaaaggtgcagttcgtggcacctcaaaacaattacaacagtaacatcaaagatcactgatcacagatcaccataacagatataataataatgaaaacgtctgaaatatgggaaggattaccaaaacatgacatagagacatgaagcaagcacaaactattggaaaaatggtgctgacggacttgatttgctcagtacagttgccacaaaccttcaattaaaaaaaaaaaatgcagcatctgcaaagtgaagaagtacaacagagtaaggtatacctgtatataaattttaagcaatgcagaaagttttaattcagccatatgcctaagaattttgactaagccagtatatggacttgcaggttgtatcagaacccagcaattctatacacagtcatccctcaatatccatggcgaactggttccaggaaccccacagataccaaaatccatgaatgcacaagttccttatattaaatggcacagtatttgcatataactacatacatcctccagtatactttaaatcatgtctagattacttattacacctaatacaatgtaaatgctatccaaataattgttatactgcattggtttttttttttattgtttttttctattgctttttttctcccaatatttccaacatgcagttagctgaatctgtggatgcagaacaagcaggatacagagggctaactgtagttttgttacattttttatttttattttttaagagacagggtatcactctgtcacccacgctagagtgcagtggcacaatcatagctcactgtagcttcaaactcttgggctcaagtgatccttccacctcagcttcccaagtaaccgcaactataaacatgcacacacccggactaattttttttattttttgtacagacagggtctcactacgttatccaggctgctctcaaattcctggcttcaagtgaccctcctgctttggcctcccaaagcactggaattacaggcgtgagccactgtgcctggctagttttgtctcttttaaagaggagtaagcagctatgtctttgaaaatttcactgggtggaagaaccaggaaaacacaaaggaaattacagactacaccaggaagcagaggtgaaatatgatgccttaataactagcatgccaatcatgagccacattctatgcctttctcttatgcatcttctctccatttcatcctcctgtctcattaattttttccttcccctatttaacgccttcaatccaataaaatgacgtatcttgttctcgttttcttttttttgagggggtggggggcttctgggcttcctctcatctcatacctaatgatcacatcctttccatttccatcttcactttacagctccctacactctttatcctaatggtcctcctctagtatcacaactcaaaatagaaagagtattaaaaaaaaatgagaaaaaccaaaggggaaaaatggaaaaaggactacatactcctatctaattgtaccttacttaaacactatgcatgatacaaattatacggactgaatcattacgtttaagcttcttataaaaatccaaatgttctattcataacacccaaaatatggaatcaatctaagtgtccatcaacaacatcatataattaaataaagaaaatggaatactatttgaaaatactgcttgaaaggtgactttttctttttttttttttttgagacagggtctggctctatcacccaggctggagtgcagtggcatgatctcaggtcattgtaacctctgcttcctgggctcaagcaatcctcccaacctcagcctcccaagtagctgggactacaggcacgtgccaccatgcctggtgaatttttgtattttttttagagagagagttttgccatgttgttcaggctggtcttgaactcctgagttcaagcaatctgcccacctcggcctcccaaagtgcaaggattataggcatgagccaccacatacaatcaaaaggtgactttttaaatagtaacttgaatttcattctaattgaagaaaaccatatatagctaaaggtatactttttaaaagtcttcctaatatgagcatgtgataattaaaatactaaagaaatggctatttttaattacatcattttcatcaacatcttactataatcttagtagtgttctataacttagtatggtaatacagtgtttttacaaaggcaatgtggatattctattaaaactgagctgtttccagcataaatctcaatcacacagcaatttatttcttggcccacccaaaactgaatatacaaattgccaaagttcaaattgctgatacaaattgccaaagttcatcaataatcctccaacatggtgattttgaaacttttgattttttatttatttatttatttatttatttgcctcagaaacagtgttcaaatggaatcttatctagaaacatgaggaaatagaacaggtaagaatgtagaatactctggtagaagccaaggggtgctcagtgacaccctgaacaggccagctgaaaatgctctatttcaccataagagttatctcttctctttgcccagcaaatctaactcatcaatcaggactcagctgaggtatgacctccctgggaaaactttccctgaacctccaaacatgaggtgttagatatctcttccaacccacatacttccccatatctatcccatcacagctgttaccacactgtgtactgaaacagcctacccattcgtctgtttcttccagctgagtgaaagtctctctaaagcctcaaacccattcttttttgtttcttttttttgttttgttttgtttttgagatggagtctcactctgtcacccagactggagtgcaatggcacagtcttggctcactgcaacctctacctctcgggttcaagtgattctcctgcctcagcctccccagtagctgggattacaggtgcctgccaccacgctcagctaatttttgtatttttagtagagacggggtttcaccatgtttgccaggctggtctcaaacttctgaccttgtgatccacccgcctcagcctcccaaagtgctgggattacaggcgtgagccatggcacccggccgagacccattctttgttgtatctcttgtgagagcacatcaggcctacacttaggagtaggtggtactcaatacatactagttgaacaggtaaaaaggggataagtgtgtgccctgattcataacaacatatttatctttgtttagatatgaaaagttccttctctgcatataagcaccaggagggtagggactatgtcagttgtgattaccttgtgtacatattacctgccacatagtattgctaaccagctgttgcctctactcctaggaatgccttgagagtgcttcactttgaactgttggaatctttttacaggcattgctttcttcaacactggccctgaagtagggtaaatgtgggttcttattgcatctcagtcactaactagcagtgtgattttgggcaattcatgtaaaagctctaggtctcattttctgtatctgcaaaattgtttttaaatatgctttagcactagaagacttttcctcaaataaaaatttcaaaagagtcccatatataaaaaagataaaagcaataatgaggttctcattctactcaattcttcagtgaagaaaatgcccctagaagtaccttcttagagcagggtatgatttgaaaacactaaactagctgacccacagaagttgaatctagcactaatattctatgatttatccatttaataaatactcattaaatgtatactctgtacctggtactgaactaggcactgcacattcagcaataaacaaagcagatgggctccctgagatatttatgctaacatgtagtattcagcccattattaaatattcacttaaaatgaacaaaaaaagattaaaacaccacctctggtccttttatagagtatagaaaacaagacaatttaccaaattcacaaatagctgaatgtattaagaaaatagttaaatttcagaaatgcatatctcattttccctatcaaaatttcagtgtattatttgggaatttttcaattcatactgttttcttccaatcatttttatgctaatttcttaataacacatttacattaatactagttattggtagctaaaatctaagtttctccctgtcatttcctaattgtttttctttttcttttttttttctttttgagacagagtctcactctgtcacccaggctggagttcagtggtacaatctcagctcactgcaccttccgccttccaggttaaagtgattctcctgcctcagcctcccaagtagttagaattacagtcacctgccaccacgtccagctaatttttatatctatttagtagaaatggagttttgccatgttggccaggctggtgttgaactcctgacctcagatgatccacccacctccgcctcccaaagtgctgagattacaggcgtgagccaccatgcccggccctaatttattttttactagtcctatcttttagcattttaggatcttttaaccaactaattttttgatccttcgcaacttcatacttacaatatgaatttgacagtaaaatcttaaaaggcagaaaccatttttcatcaatatttgcctcagcatttatttcattcaacaaatatttgagaagtacctactatgtgcaaggcattctgctataaagtggtacaaaagttctagaattctataacatttccttctcattgtattctttacttttctttccctttaaaagcttaaagtgcataacaagaataagtacctgatttccctggggttccctcaatctgtaatgctcttccttgtactcctcatacataccacaccctttcattcattcatcaaaaagtatactgctaggcgctgaacaggtgctaataaagaaaaatatatggttcctttccttaaggaatgaagagaagaataaagatagtgatgacatttcagaaggaaaatctacaagactcagtatcatctgaagtatcataaaaaggaataaagatgattctcagccttgctaaaagactaagtagatgatgatgcctttgatacacaggaatttgaaaggcttgtctggaatgtttaaaactggttttagaatgttaaatgtgtaattccctctggatagtctagttgagttgcccaaacagaaattattaaatagaagtactcattagtatctgagtaaccattatgtggcaggatccaaggacactgagtaaaatacaatccccgaactcaaggaacttaagacttagatgatagagaatacaagtaaacaggcacttaaaagagaaactcaggtaagagactggaggtgtaagcactagatggaacatgaaggaccttgtatgccactcttaggagactggatttctcgaggcaatggggaaccatgggttttaaacagggaatgcttgattacatttgcattttggaaagaacgctctagcttcaaggaagataatgggttggaggaggcaaacaaagtgaacaaataagatgctgttgcagaaatctgaacaagatttgagggaagagatatgtaatagtaatatttgagaccctgactttcctagacaacactcaaagtacaatgctaatccttgaactatttttaaccataataacaaaataatactcgcatcaggcaagtataaagcatacctggtggccgagcactatgctatctcatctcttattctatatcaaattgtgggaaccacagttgaggaatgtatctttttttttcctataaccacttgaatttcacatgctatgggaaatatgtaacataatttaaatatacagcatattctaaagaaaagcaaaattgaacagatccaagcagcaaagttcctctaggattatgcaatcacttcattagccaaaaagcttacaatctatagatcctatgtattgttaggagtgaaagctttccataaatctctaattacagggccctgaattgataaggggagacaatgtgcccagactaccctgtgtcaccagctctaagtcacacgagacaatttttacaaataagactgaagttgaaggtttctgggaaagccccttccctgcttcttcttttcttcctcctgcctggaatgtagacataaagctggggctgtagcagccctgttgtagccatgagataataagcatgaggacaaagcacatgctaacgatgagagagtacaagaaaagaagactgagacatggctgttcctttgttgctgctgtactagcagactttttgttaagggagaataataaatccctctgtggttaagtaactttaggctaaacatagtcataatttatatactctgaatcccttatagaataaagcctaggctacttcacattgcataagatgcttctcaccatcagctccatttaactatccaacctcatttcattctgttctctgtcccatactttccattccaataattctaaatcttgtcagatgagcacaccccaatgagttgtttttacctttctacctgtcatccccttgactctcccttatcactccatttcttcacccaattaactcttcgtcagcattccagatttcctggctccactggctgaggaagatgccctgccttcttcttttcacattaccccatgcaccagtcactacaatgagtgtgctatattacagctatttatttatatatttgtcttcccaactacactactgacccctcaaaaagaaaaaagtatcttagttcttttggcattcttagatcctggcacagtaccgggtcaactggggatgctcagtgaatgttgaatgaattagatttacataaaacatgacttcttaattagtaaaagtgattacataatacagactgttaaatgacccctttaacatcaaaaactcattctcatccataaatttgtcctaaaaaagtccaggctatagtgcagtgctgcaatcatagctaactgtggccctgaactcctgggctcaaacaatcctcccgcctcagcttcccaagtagctagaactacaagtccaagctaccacctggataattttttcttttttggtagagaaagggtctcactatgttgctcagactggccttgaactcctgggctcctttaccctcgatgctctggcctctctaagggttgagattacaggcgtgatctaccacatccagcctcatttctgcttttaagcagaaaagctgcaaagagctgtaagtcctaaagacacttgacaaagccatcctcatctgccttaaaggattaatctcacttccaatgggaagtcagaaatgaaaactaggccaggcatggtagctcacgcctgtaatcccagcactttgggaggccaaggcgggtggatcacctgaggtcaggagttcgagatcagcctgaccaacatggagaaacccatctctactaaaaatacaaaattagccaggcatggtggcacatgactgtaatcccagatactcagggggctgaggcaggagaatcgcttgaacccagaaagcggaggttgtggtgagccgagatggcgccattgcactccagcctgggcaacaacggcaaaaccctgtctcaaaaaaaagaaaagaaaaagaaatgaaaactaaacagatgatcaaagaataaattttgttatattttattagcaaaactcgtcaaaacaagggtaagcaaagaaataaaatctcttcatacctgtcacattgctgcattatggaaatttctttgattatttcctgaagatctgattcaacaggtacttgtttaattgcgacaacttgaccggattccttgtgtattgctttaaatacacttccataagacctaaaagaaaccaagacattatttttttcctatcaaacatcgtaactataagattaaaagtctactatgagttttctgtggatagtcttttctagtttaaaacactatttaaatgattaaaaaatcaaagtaaacaagtaacaattttaaaaggtaatgaattatatcttagctttattgcttcaactacagacttaaaatagtcaagttaacatataatgagtagctatttttcttatgaatgaaagaaacagacttgcgtttggtcaactcaaacaaatgcagcattaagaagatataaatggaaattaaaagaatgaaatgtagattaaaaatagccaaagcctcaaattaggagaaaaggctgatctcaaggaaaatgacccccagaatatcaaaaagtcacacttctgttcagagtaccttaacagttaaaaccctcagctggggaccatattaacatcaaagttagagaagcaaggaatctgcagccatctgcttctacctgatttacagatccaaggtctctttttaaaaagttcctttcattaccttttcctcaagagaaaaactacaaactcacaggtaaataaaatgaggaacagggtctaatagtcacttgcccaaaacctgtctctgctacaactcctgaaactttgccaactgaatattcacgtgttttaaaaagcaaaaacaaagaaggaagaagccatttgtaccttagtatgaacttaaaaacgaggttaaacactactatgtactgagttcttactataaaccaggtcctatgctaggtgttttacatgcattatgaaattcaaccctcacaatcataaggaaaaacactattatcgtcattaaaagatgagaaacagaccagtagggccagaattcaaacacattcccaccccaaaaatcaggtttttctcaccatatttttctacagaagagaaacaagagcaagccaatggaaaacatcgaatgtttcctaatattagaaatctatgcagaagcccttccaaatttataatcttttaaaataagtgaaaaagagacaaataagtgataacgcggctacttcaataaaatacattttatcctctcctctgtttctttgggctctctgaagtcatttaatttggtttggtacccaaagtcacattgggctgggtgtgggggaatgtatgtgtgtgtatctccccttgaaagccatatgtgtgtatgtgtgtatattccctcaaaagctaacatagaattcagtgctagatcatctactgtcaattaggcaacaccatcactcctttctaaggactcctcagcactacgaaagagaagctgcaatccccacttcccagaatccccttccctgaatggttcctcattaaaagtctgccagtgagaaaaacacgtatgtgtgaatgacgaaaggagaaaccatttttctccagatacagttgtagcagatggactgacagatatgaagtgcacagcagcttcctgctgagcttccaacagccaccactgctgcagactgaggtagttggtgggagtttctcaagactgcaggattccagcagattcccagagagcttttgagaaacacccacttcagtgcttcaggctgagatcttcaatgctgacttcgaccttcaacctttggcaacagttttcatgaactttgcatccctggcccctccacaattcatttgagctcctaacttcattactaaattcttcatatctatagagtacatacagtagcttatcttttccttgatagcaatatagtttttggtagaagaagtgtttccaagggaaagaatcttaaagatgagaatcttgaattagttctttcttagatgttgatatggtttggctatgtcccacccgaatctcatcttgtagctcccataattcccacctgttgtggtagggactcagtgggagatgactgaatcatgggggcaggtctttcccatgctgttctcatgatagtgaatgggtctcacaagatctgatggttttaaaaatgggagtttgtctgcacaagctctctctttgcccgctgccatccatgtacgatgtgacctgatcttccttgccttccaccatgattgtgaggcctccctacccacgtggaactataagtcaattaaacctctttctttcgtaaattgcccagtcccaggtatgtctttaccaacagtgtgaaaacagactaatacagatgtgtagacagtaatgacttcaatacaagtaacaaatagtatactgatggtctatggcattcagtggcaaacagttatttaaattatcacccttagttgcctggagtctaagcaaagctttaaaagaccaagtagctgtatcaatacaatgtatggtgaaaataaagtataaggactatagaatgggctgctgcctctgcctgcactggaaaagttatagaacaaacacagcaagctaaaggcttaaatgtccagctcaagactgagagaaccagaaaacttctgaatttcttaattcttacagaaacagggttgagatttctgaaaaacaaactctaggtatagtcttactggaagttgaattacatttcaagttgaattcacatcagcaccaggtctgttatgttaaagttaaggtatctaacaataaagagaagtacctagagaactggtattaggacatttagatagattctcattaatctgagtaccttgaatccccaaatcctatcaagcctcccttgataccaaaagcaactctgccctcctgtctgagaaaattaaccttacaatgcctgaagactctatctacctcctgaggcagtcacttttcagcagcatgcagtggtcctccagaccactccaccaccacttattgcttccagacccaaagttatactcaactcccatagacaccagggagacaagtataaaatttaacccaagcagctactattcacactaaaaaagttgcaagattttgccaatttttatcagaaccctaaagaatatgtgtgagaacaaattctaagatttccagagaggaagaaatgtactgatatggatgcaagaccagaaattccagactcagcatgttagctcaaacagttgggggtgtccctaacagttgctcagccagttaactgaaacctggactcaaaagtggcccatattaagtgagatgctaagtgagcctcagtacacaccaaaggaagcatatcaaaggctcaaggaaatgggatactagaatggatatatattataagtgccatgctcacatactccctaactatgttgacaaaaagggtccagaggataccagcatcgaccaaagctctattagtgcaggggaaagatgacaaatatgccaacagtgaaactggctccttgagtttaatagataacaggatcccagcacaagagaagtggcaacagctattcacctgagacaaagtgggaacagttaccataatgagtaacaaagcaaggctgaattacagttttcttttattgtacatttaggtcttgatattaaagttacactagcttcatttaaaaaaaaactataattaactgtcctttaaacactgtataaaacagtgtttaatacagtggaacctttctggaggggaggaggtgaaatacacacaacataaaattcactgttttaaagtgtatgattcaatggcatttagtgcattcacaatgctgtacaaccattatctgtatgtagttccaaaatatatagaatctgctttctgtctctacagatttatctattctagatacttcatataaatgaaatcatacaatatgtgaccttttatatctggcttcttccttcacttagcataatattttgtaggtccaactacactgtaaaatgtaccagtacttcactactttttatggctaaaaggtcactgtacagacatatcacgttttgtttattcacctgggatagcagatggacatttgagttgtttccacattttggctattgtaaataatatgctatgagttggtacctttataattaacagttatttaatcatttctctatcactggctatatcttccttcttattccaaatcttctgtattttctattttctttagtcaacattgtaagaggtttaattattttactgatctcttcaaaagcttttatatatacaaacatatacgtatctttttttttttgagacagagtcatgctgtgtcacccaggccagagtgcaatggcacaatctcggctcactgcaacctccgcctcctgggttcaagcaattctcctgtctcagccttccaagtagctgggattacaggcacatgccaccacgcccggctaatttttgtatttttagtagagatggctactctactaaatgacaatatggtttcaccatattggtcaagctggtctcgaactcctgacctcaagtgatccacccacctcggcctcccaaaatgctgggattacagcgtgtaagccactgcacctggcccatatttatcatttctaattttttttctatctcattaatttcagctttttctttaattcaatcttcagtttcttttggtatgtttcataatttttctaagttctttaagtaagcactaagtttattttttgcctttctttgttagtctaatgaaagaatttagaactaaaacttttaattagttttgctatattccatagatactggcacaatgtgttctccttttcattgttttataatttataatatcctcttcaatcaatgggttacttcagattatgtttcctaatttctagttggtgtggattttgtcatattataattacttatttctaatttagtgagtataatcagtgatatggtttgcatatttgtcttctccaaatctcattttgaaatgtaatccctaatgttggagatggaacctgttaggagacgtttgggtcacaggggcagtttcctcatggcttggtgctgtccttgagatggtgagttttcacaggatgtgcttatttaaagcggtgtggcaggccgggtgcagtggctcgtgcctgtcatcccaacactttgggaggccgaggtgggaagatcacctgaggtcaggagttcaagaccagcctggccaacattgtgaaacctcatctctactaaaaatatgaaaattagctgggcgtggtggcaggcacctgtaatcccagctactcgggaggttgaggcaacagaatcccttgaacccgggagaaggatgcagtgagccacgatcacgccattgcactccaggctggatgacgagagtgaaactctgtctcaaaaaaattttaaaataaaaaaaaataaaactgcgtggcacctcccctgccctatcttgctcctgctctcaccatgtgagacatctgctccccctttgccttcttccatgactataaccttcctgaagccctcaccagaagcggatgccggcaccgtgctttttgcagtgtctgcagaaccgtgagccaattaaatttttctttataaattacccagcctaaggtatttttcttataacaacacaagaacagcttaatacaatcagaaaatgtgacctgtaaaaatctcttattttttagaatttgtaacttttcttttatcaatggtcctttgaacatacaccagaaaagcaggtctgcaagaatatatatgcatagttatatagacatacaggtactttatatatttttactttatatatatttacatttctataaaatcaagtgtattcatcataatgtttaatccctctatgtcctttctcttttttctattatatctgtccaattctaaaagagatacattgaaatctcccatgcaattatacttttattagatgcctctgacatcactaatagcttttctgtcataaatttagctgccatgttgtctgacatgttttgttataaattgtccttgatattgctacctaatatatctctttatttagttgaaaccttttaaactttaatgtatctaatataaatattgctactattactttctgtttttttatttgtatgtttatctataatatttttataagaaatatccttataggctatgcacagtggcccacacctataatcctaacaatttgggaggccaaggaaggaggatcacttgaggccaggagttgaagaccagcctgggtaacatagcaagatcccatctctattaataataaataaatagccttatatttccattatttgttttacttgcatctcctataaacagaatataggtagatttcgcatgttcatttactctaacagtttgtcttttaatgggaaaattaacatttactgaaaagtacacttgattttattccttccatcatgttcagcttatttttattttttatttatttatttatttatttatttattttttgagacggagcttcgcttgtgttgtccaggctagagtgcaatggcgtgatctcagctcaccacaaccttcaccttccgggttcaagcgattctcctgcctcagcttcccgaatagctgggattacaggcacccgctaccacgcccagctaatttagtatttttagtagacatggggtttctccatgttggtcaagctggtcttgaacttccgacctcaagtgatccacccacctcagcctcccaaagtgctggaattacaggcgtgagccaccgcgaccggcctagcttattattttaccttttcattttctctatttccttgtccttgttcttgctgatctataagcttcttttaattctgttttgtacctttattattttggaaattctcctatactttgccattccattaaatgctccctacctttctctctgctcaaaccggcacgtttctctactgttattttgaaatcatgtcaactattcttctgcctatataaactgtttccctcactaagatattcttgtcatatcaagacaaagactacttaccttttccaaaataaaatgagcctcaagatctaaaaggatggccttatggtcacttgcctaacaaagtcaaaaccttcaaacgtattaataagaatgccgtaagggatgaactaacaaaactcttaaacatcatttcacagcacatttcttgcttttcccttatatatatatatggcctactttctctgaaaaaacactattaccagatttagcacaaactaatctttaaaattcagtatcacctgccaagtttaattactattaaatactattcaattcatacgaatatactctagttgaaagattaacatcatataatattttttaaattgttctgaaattatttacatgctttcatactttttgtacttacccttctccaagcttctctaatacatcaaaaacttcttcaggctgcttagtcaaactgtcttcactcagcttttttagtttactgatttaaaaaagaaagaagaaagaaaatattttctttaaagaccttttacaaaatttttaatttttaaaattttaccaagtttttaattttattttaatatattcagaagactcaaacaatataaaaacatacatagtaaacattctcctttcaagccctgttcctcatgtgcccagcaacacctccaaaaataatcacttttattagttttttgtgaaacctttatataaatatgaatacatattcttaattcctcccctttgaatatataagaagcatatacacacccttctgtataaatattgtcatgttgtctactgttttctcttgacaaaactatgttagagatctttccatacaggttaatcatccataatccaaaaatctgaaatccaaaatgctccaagatctgaaattttttgagcaccaacatgatacccacaatggaaaatgccacacctgacctcatgtaatgagtcacagtcaaactgtaagcacataacacaatttaaggaaaaaagatcctccccagcccccttcagctctgacatatcttttccatgcatgcacagattctcccacccaagcacatccaaagaagggtaataaaatggcacaggtacacgccagacgcaccaatgataggttccccacgatgccccacacggagccaagactgtgcattactcactgtgggtttttttgcttattctctgctttgttggataaagacaatgttgaaaatctgagtaagtgacagaaaaagaggaagcatttatgcttatctctagccaaaaagtcaagctgctggataaactggaaagcagtatgggaaatgtcttacaaaagagcatggtgttggaatgaccaccatatacaacctgaagaaacagaaggataaattgttgaagttctatgctgaagtgtcaatgaacagaagttaatgaaaaatttttcttaattgcagaaaaccaaatgaagatctcaaatgtgtactgaaagagtaaatctgtcagcacggcagagaaaacatactacttaatggtatggtgctcatgaaacaagcaaagatatatcatgatgaactgaaaattgaagggaactatgaatattcaacaggctgattgcagaaatttaagaaaagacacattaatttttcaaagatttgtggtgaataaagcaactgctgatcatgaagaagcagaaaaattcattgacaagtctgccaaggccatcactgatgaaaatctgacaccagaacaagtctataatgctgatgaaacatcacagtttagtgttagttccccagaaagactctgactacagcccctacaggataagaatgccatggacagagtaactgtcctgggaggtgctaatgcagaaggcacactaagtgtaaacctgctgtgtgggaaagattgggttcattattagactaacaaaaaggcatgggtcactagggacatcttttctgattggtttcacaaacattttgtagcagtggttcaggtttgctgcagggaagctggactggatgatggctacaagattttgttattccttgacaactgttctgctcatcctccagctgaaaaatctcattaaatataatgtttattccatgtacttttccccaaatgtgacttcattaattcagcaagtgagcagggtatcctcagatcaataaagaataaaaataaaaacactttcttgaacagcctacttgcagcagtgaacagaaatatgagcgtggaaggttttcaaaagcagttcagcatttagaatgctgtatatgctattgtcgatgactggaacacagtatctaaagacacagttgtgcatacctggcacaatctctagcttgcaactatgttcagtaacgatgatgaacaaggcaatgactttgaaggattctgtatgtcaagataaaaaaaaaaaaaaataggccaggagcggtggctcacgcctgtaatcccagcactttggaaggccgaggcggtggatcacgaggtcaggagaccgagaccatcctggctaacacggtgaaaccccgtctctactaaaaatacgaaaaataagccaggcatggtggcgggtacctgtagtcccagctacttgcgaggctgaggcaggagaatggcgtgaacccaggaggcggagcttgccgtgagccgagatcgcgccgctgcactccagcctgggcgacagagcaagactccgtctcaaaaaaaaaaaattaattaaaaattttaaaaataaataaataaaaataaaaaggtgtttgacttccttacatatacaaaaaaataccttcagagtctgtcagtaagttggaagaaatggatatcaaataagtttttaacattgataatgagtctccagttgctcattcattgaccaatggtaaaatagcagaaatgggctgggcacggtggctcacgcctgtattccagcactttgggaggccgaggtaggcgtatcctttgagctcaggagttcgagaccagcccgggcaaacggcggaaccctgtctctattaaaaaatacaaaacgtttggtgggcatgatggcacatgcctgtggtcccagctacttgggagactgagcctgggagatggaggttgcagtgagccgagatcacgccactgcactccagcctgggtggcagagttagaccctatctcaaaaaaagaaaaaagaaatagcagaaatggttctgaatcaaggttatggtagtagtaatgacaatgaagatgatgttaacattgcagaaaaagtgccggaagacaacatggtgtgatgggcttattttaggactagagtgcattcttaacagaataggaaatcacgtcactttataacatcaaagagagacttctaagacaaaagccactgttaatgaggcagacgattctcgaggaaacattttaaaaagccatccaagcaatggggaaaggattccctatttaataaatggtgctgggaaaactggctagccatatgtagaaagctgaaactggatcccttccttacaccttatacaaaaattaattcaagatggattaaagatttacatgttagacctaaaaccagaaaaaccctagaagaaaacctaggcaataccattcaggacataggcatgggtaaggacttcatgtctaaaacactaaaagcaatggcaacgaaagccaaaattgacaaatgggatctaattaaactaaagagcttctgcacagcaaaagaaactaccatcagagtgaacaggcaacctacagaatgggagaaaatttttgcaatctactcatctgacaaagggctaatatccagaatctacgatgaactcaaacaaatttacaagaaaaaaacaaacaaccccatcaaaaagtgggcaaaggatatgaacacacacttctcaaaagaagacatttatgcagccaaaagacacatgaaaacatgctcatcatcactgaccatcagagaaatgcaaatcaaaaccacaatgagataccatctcacaccagttagaatggcaatcattaaaaagtcaggaaacaacaggtgctggagaggatgtggagaaataggaacacttttacactgttggtgggactgtaaactagttcaaccattgtggaagacagtgtggcgattcctcagggatctagaactagaaataccgtttgacccagccatcccattactgggtatatacccaaaggattataaatcatgctgctataaagacacatgcacacgtatgtttattgcggcactattcacaatagcaaagacttggaaccaacccaaatgtccaacaatgatagactggattaagaaaatgtggtacatatacaccatggaatactatgcagccataaaaaatgatgagttcatgtcctttgtagggacatggatgaagctggaaaccatcattctgagcaaactatcacaaggacaaaaaaccaaacaccgcatgttctcactcataggtgggaattgaacgatgagaacacatggacacaggaaggggaacatcgcacaccggggacggttgtggggtgggtggagcgggcagggatagcattaggagatatacctaatgctaaatgacgagttaatgggtgcagcacaccaacatggcacatgtatacatatgtaacaaacctgcacattgtgcacatgtaccctaaaacttaaagtataataataataaaataaaataaaataaaataaaaaagccatccagcagaatgtttccttatccctagcagacctatttcctggcccctcagctgcttctgatgtttcttctcaactaaaaaaaaaaccacacagtgtataatagtaacctttcaatcaaaaatcagcatcataggtgaaaactaaaagcctgccgttgtttgttgttcctgttgtttaaaagctgatagaggtattctggtaatgccactgtgctgcttcattaccctgaacatattttttttccactgtattaatgttatgccatattttttgcagttaagtacttatgcatgagcaagtataagaaaatgattgcttatcagtagcatgtaaattcagagtcagaaatgaaggtgatgccaaacaactccacagactgtccacatgggtggctgagatagtgacacctttcctttctgatggttcaatgtatgcaaactttgtttcatgcagaaaattacttaaaatattgtataacattacctacaggctatgtgtataaggtagatacaaaaatttcatgtttggccttgggtcccagccccaaaatatctcattatgtatatgcaaatactccaaaaaacaaaacaaaacaaaattcagaaatctgaaacatttatggtcccaagcatctcagataagggattctcaacctgaataaagcatcaatgttcttttttacagctgcatcctattcaattacagagatatagcatatcttacttgcccagtcttttgcttatggacatccaggttctcttttgatatgataaacaatgctgcactgagtaaccttatatataagtcaatgaatgaatgaatgaatgaatgaatgaatgaatatatataaacttatatataagtcaatgaatgaataagtcatgtgctagtatatatgtggaataaattcccagaaatgaaactgagaatacagacacattcacacacacataaatataaaagtagatatgctgacaaataagtatataatcatgtaataatataattttaataatgtagtataacataagatcactattgtcataactatatggtaattattaaaattattgattacattatggtatattttacctattataattatatgttatataaatatatatacatatacactgatttcagcaagttgtcctccatagagtttgtactaatttattctccaacaagtaatatatgagagcccttctttcccacagttccatcaatagggtatttaatgaaattatttggattttagccaatctgtgatgaaaacttattagctcagtgtagacttaacttgtattattatgagtgaagttgaccatcttttcatatgattaagaagctaaatcacctacttgttctttgctcatttttccactgggttttcggtccttttcttatgtgtatacaaaggaaactagcccttttttcgagattataaacattttcatttggattttgacttcacttataagcttttagttttgcagtctatttgattttttgccatataaaaaatgtcattattttatttttgcaaatgagtggatggtaatgccatttactaaggtaagaaacacaggggaaaaaaaaaacagtctggaggggaacaagatgggctcaattctagtcatctaaaagtagatttccggtaagcaactggatttacaaatctcaggagagatttgaactagaaatataatttttggtgtcatcagcacattgcttaaagctttcagaagagacaaaatcatcaagaaaatgtctaagaaaaaataagagtcaaacacaaaacacatatcaaggaaacaccaatatttaagaaatgaggtcatgaagcacaagaaggtaatatttggctacatcaaaagctaccaaaagtgcaagcagcttgaaagtttaagtatccattgtagaacttccacttctagccaccaggtttatgacaggaagcagaattatctgtcagctgcaaatagctacaaaactcaacaaaatgtaagaaactattttcagatgctggctatcaggcattccagaactggatatactgaggtccccaagagaaggagaagaaataagatgagccctgccatcgcccaggctttagatctagagactatgtcagactgtagcacaggaaaagaagaactcaaagagaaccaagtaattttgctgagttgaagaaatagagcttagagtttggtgaggaatcaaggcaaatggaaattccattacagagtatcgggagaagggagctatgcagggaaaaggttcagcaatctatctagaggtttccatgaaatgccaatctgtgcatgcttacaaaacactcctcaaagcccagcaaaaccagtttcttaaggcgaaaaaaaatgaccagggaggaataaaaagcaaaattcccagacaaggcaatttatcacaaaatatcacaaggcagggaatctttcccactatccagagttgaaagaactccacgaatacaaaggtcattcagaaaagaactcagaacagcattattttagaaaggagattatattaccaaaagataaaggatattccagattctccctagaggagcttaaaaactaacctcaaaagcatcaagccaaaccacaagacaacttgcttaactgcctaccagaacgagtctgtaacttcttaagcaaagcaaaattcaacattcacaaatgtaaaattaacaatgtcaaaaaaataaaaaaaaaaattattaaacctatgagtaatcaggaactataactcataaagagaaaaattagccaataaaacagacccagaaacgaggtggtgaaattgataaaaatcttaagaaaacctcttatgaatatactttcacatactcacagatgttaaaggaaatggaaggtagggggaaagataaatggaaatttaagagataaaaaataaaatatttgctttcgttgctgcagcagacgctgtgagtattttcaatgcttcagaagaggcttgcctctagtgtcctccgctgtggcaaaaagaagatctggctggacaccaatgagaccaatgaaattggccatgccaactcctgtcagcagatccagaagctgatcaaagatgggctgattatccataagcctgcgactgtccgttcctgggctcactgccaaaaaagcaccttggcctgccagaagggcaggtacatggtcataggtaaacaaaaagggtacagccaatactcaaatgccagagaaggtaacctgggtgaggagaataggaattctgcatcagctgctcaaagatactgtgaatctaaaaagactgatcgccacatgtatcacagcctgtacctgaaggtaaaggggagtgtgttcaaaaacaggtggattctcatggaacacatccacctgctgaaggcacacagacccacaagatgctcctggctgaccaggcagaggcctgctggtctaagaccaaggaagcatgcaagtaccatgaagagcgcctccaggccaagaaggaagagagcatcaagactttgtccaaggaggaagagacgaggaaataaagctccccttctcttgtctgtacatagtggtcttggtgattatacagatcaatcattaaaataaaacaagcctttatctgctaaaaaaaaaaaaaaatctgaaatataaattttgttgaataagattaaaaggagattagacagtgcagcacaaaagatgaaatcatttgaaaaggaaaaagtgttatttaaataaaggaagaaacaaaaagcctgagtcccacatgaaaaagaaacaaatgggatgggaagtaaggaaagaaaagtaaggaaaggaaggagggaaataaggagaaacattttccaaattttatgtaaaccataaacccacacagatgcatcaaattcaacaaatttgaaaagataaaacacacaaagagagaaagaaggagagggagagagagagagagagagagaaccaaaatatattatgatcaaattgctgaacatcagtgagaaagaatactaaaagtagtcacaggaaagacatataggcatatctcagagatactgcaggttcagttccataccgcaacaataaagcaaataccacaataaagcaaataacacaaaaatgtttgttttcccaggatatataaatgtttacactatactgtagtctattatgtgtacaatagcattatgtctgaaaaaacaacgtacataccttaatataaaaataatgtttgaggtgaaggatacccactatgccctgatgattgttatgcattatatgcctgtatcaaaatatctcatgtacccaatatatacacctactatgtacccataaaaattaaaaataaaaaagattttaaacactttattgctaaaaatgccaatgatcatctgagcctacaacgagtcaaaatctttttgctggtggagaatcttgcctctatgttgatagcttctgcctgatcagggtggtggttgcaaaaggttgggttagctgtggaaatttcttaaaataagacaacaatgaagtttgccacatcaattaattcttccttcccaaaagatttctctatagcatgtgatgctgtttgatgcatcttactcacaagtagaactttcaaaattggaatcaatcctctcaaaccctgccactgctttctcaattaagattatggaatattctaaatccttttttatttccaagatggcagattagaggcttttagtgggcctcattcacttggaaatagcaagatagtgtacaaaggccaactctgagagctttaattcacaaaggaaaacaggaatccactggaatcgtgacagacacctcagatccaaggaagacacacaaacacaaacagcccctattatggcatccaattgataaaagtgagggaagcccaagtatgcaagacagtcagaaagcctccctctgtgactcacttttccactggagatctgagcaacccaggtcaagaaagagcactttgtttcttctaagccctggatctaacttggggacaagctgatttggagatgctgtgagggacagacactcggaaaagctactggcatttcccagacccaggatggagagcaggacactattttaaatgtgggtgcatgcaagtcaaccattctttggcaacccagtagcatggccacataggcttctggctctggagcaggacagaggtcttcacagccacactgtagttagtgcctcagcagtaggtgctgggattgtgctctcctccactgcaggtcaaggatgagagaagagctgctacagctattgtttctcctggacaaccagacttcaagccagatccagcttagcaacctggaactggtctgcatgtgccatgattggttgccacagcctgttcccctgtggtgcagcagggccctctctgctctactccctggcaaaaatccaggcatttggagcaactgtttgcctggacaagcaggctgaaccacctcacccttcatggatatagatcatggcacagtggaggcctctctgctccacatgcaggcagatctagagctattcagagcaccccctcacctgcaaccgcagtctgagttgccttacccttcctgtgtgtgcatagattgtggtacagtggggccctctccactccacatggagacagatacccaggcatctaatgcacctgctcacatggactagcagattgagttgccccacttttcctgtgcagagattctgtgcaggggggccctctctgctccatgcccaggcaaatctccaggcattcagagcatctgctcacctgaatcagcagcctgacttgcctcacccttcctgtgcagagatcctagtgtagggaggccctctctgcttcacactcagacagatctcccaggcattcagagcacccactcacctggatcagcagcctgaactgctccatccttctatacatagattatggtgcagcaaggcccttccactccattgcccaagaagatctccagatattcaaagtacctatttgcccaaattggcatattgggccatgccactcttcctatgaagagatctgggtacaggcaggccctccctgcttcatgcccaggcataactccaggcattcagagcacctgcttgcctggttcagcagcctacatcaccccaaccctcctccgcagaaatcttagtggtggtggggtggcagggggaccctttccacttcatatccaggcagatgtccagccatctggagcacctactcttcaggattaggagtttaagctgccacccatccctgtgcagagaacttagggccaaggaggtctcccagcttcatacccaggtacacctctgggtgcttggtgactacccactggattctccctatgcgctgacacttgtgcttgccactggagggtctggcggtgagcctgcccagtccagccctgcatatctttccctctgccccctcagggctgagcaggaaactcagactactgtacactccacaaatcagcccactgcctgaggcaacggagagctgctcccagtaaacaaggatcaaatatatacccagtcacactggcaacacctggctcttacccataagcttataggccaaactacacagcccaatataaaacctgccaactgaagtgcataggactataaaaacaaagccaaaagactctacacagcattatttccactcacaacccctaaggagtaggggaaagggaaagaagaaaaaaacaacattgtaagacaagaaagaaaaaatcctaccagtacgaaaataattacacaaattagcagtgccagtgtctccagatgggaagaaaccagtacaagaatactggcaccatgaaaaaatctgaatgtagtgccaccacagaaggatcacactagctctccagcaatggtccccaaccaacaaggacactcagaaatgacaaagaactcaaagcatgggttgcaaggaagctcagagatccaagacaagattgaaaatcaatactaaaaaacttcaaaggaaatccaggaaataagaggtaaagatttttaaaagaaatcaatcagagcttctggaaatgaaaaaggtttacttaagaaatttcaaaatataactgaaagctttatcaatagactggaccaagcaaaagaaagaatttcaggccaggcatggtggctcatgcctataatcccaacacttgaggaggctgacgtaggaagaccatttgagccaagtagcttgagaccatcctggaaaacataaagagaccgtgtctttccaaagaaatttaaaaattagctgggcatgatggtttgcacctatcgttctagctacttgggaggctggggtgaaaggatcacctgagcctgggagttcaaggctgcagtgagccatgatcacatcactgcaaaacagatgaacaaaaggaaaaaagaagaaaggaatgaaagctgatcttttgaactaacccagtcaacaaaaatagaggaaaatgaacttttaaaattgaacaaagtctttaagaaatacaggattatgtaaagcgatcaaacctataaattattagcattcatgatacagaaagagaaaaagcaaacaacctggaaaatatatttgaggaactaactcaaaaaaatttccctaatcttgctagagtagtagacatccagatacaacaaatccagacaacaactgtgagataatatacaaatccagacaacacttgtgagataacatacaaaatgaacatcaccaaggcatatactcaccaggccgtccaaggtcaatgtggtgcggtggctcacgcctgtaatcccagcactttgagaggccaagacgggcagatcaagaggtcaggagatcgagaccttcctggccaacatggtgaaaccccgtctctactaaaaatacaaaaattagcttggtgtggtggtgcatgcctgtagtcccagctactcgggaggctgaggcagaagaatcacttgaacccaggagctggaggttgcagtgagctgaggtcgcaccactgcactccaatctggcaacagagcgagactccacctcaaaaaaaaaaaaaaaaaaaaaaaaaaacaagaactgaaggaagagatatttaatgaaatagatagcataaataaaaaaacttcaggaaacaatggacacatttacagaaatgcaaaatgctctggagagtctcagcaatagaatcaaacaagcagaagaacgaacttgagagctcaaagacaaggtttttgaattaacccaatccaacaaagacaaaggaaaaagaataagaaaatatggacaaagcctccaagaagtctgggattatgttaaacgaccaaacctaagaataatcagcattcctgagaaagaagataaatctaaaagtctggaaaatatatttgggggaataattgaggaaaacttcccagccttgatagagacccagacatccaaatacaagaagctcaaagaacacctggggaattcatcacaaaaagatcatcgcctagacacactgtcatcaaattatctaaagttaagacaaagaaaagagtcttaagagccatgaggaaaaagcaccaggtaacctttaaaggaaaacctatcagattagcagcagatttctcagcaaaaactttacaagctagaagggattgcagccctgtcttcagcctcctcaaacaaaacaattatcagccaagaattttgcacccagcgaaactaagctacataaatgtcggaaagatacagtctttttcagacaaacaaatgctgagagaatttgccactaccaagccagcattacaaaaactgctaaaaggagctctaaatcttgaaacaaagccagaaaacacatcaaaacagaacccctttaaagcataaatctcacaggacctacaaaacaaaaatacaatttaaaaaacaaaacaaaacaagaaaaccaaggtatacaggcaacaaatcgcataatgaatggaatgatacctcacatctcaataccaacgttgaatgtaaatagcctaaacattccacttaaaagatacagaactggccgggcatggtggctcacgggggtaatctcaatactgggaggccgaggcaggcagatcacaaggccaggagttcgagaccagcctggacaacatggtgaaaccctgtttctactaaaaatacaaaaattagccgggcgtggtggtgcgcgcctgtaatcccagctactcaggaggctgagacaggagaactgcttgaacccaggaggcggaagttgcagtgagccctgattataccactgcactccagcctgggtgatggagtaagactccatctcagaaaaaacaaacaaacaaacaaacaaaaaaaaaaatacatatataattgcagaacgga

SEQ ID NO: 20 - DNA, 191331 bp, Homo sapiens
tccttagatccatcttccagtttacctttcctgacttccctcttctgaattgagtcttacatatttctatcaggacatgtattatacaatactgcaattaatttttacaaggccatttctccactagactataagctccttgaaggcagagctgtgacttacacaccaactcatcttttaaaccctaatgactagtatagacctggcacagagacattgtttattaaataccatttgaactaaactatcggatcaaatataaactgtctagaaataggacattttgacctttggcactagaaggatctcagtgagtaactattttataataaccgaggtttgaatataccaaacacacagtttctgtgagagcaaaatttgtcccagagttcagatttcaacaattaaaagtgtagtaaaaagctacttgctgacttttaaaatctagtgaatttgaattatactaaaaaaagcaagaaacatattggtataaagcagctgtcagaaagtttcctgataatcctctgtataaactgatacatcttattctatattttttctgaaattttgtctaattattcaaggttgattgcatgcttattaaatttatttaatacatttctttgaatggtagtaacacagtaaatcctcattaactcccctaattactggggaggaaaacttcaaatttgcaatgcttttaaaagatggtggtttgattaccttcaaagacatacagtaacttgaggtaaccattactaaatactgcttccaattacaagctctggtaaatgtactttaatgactacaaattcctgcaatcagaagtatcatttgcatacattgagcaggcccttagaaacttcccattacattagattaaaaatgtctagtttacatcattacttattcagcacattatctctttttctaacattttagaattaatggaagtttaaacatctctctctttctcttgttttctctttcttctactcccccacttccctgtcctttcactggtcagggaagagaacagagccagagaaggaaagtgtcttatgcaaagtcacacagctagatagcagccaaattttgagcccaaggcacccaggtcaagtctgaatcactatttatctgcagaatgcaatagataactttttggctagtcaatgtcaatgtaccacaattttttaattagcagaatttgtttctttttctcaatacaaatgaaataaagcaatgacaatagttaggaggaaaggttgttccacatcttaataatgtagttataagtagaggccaaaacacaggaagatgtctttaattaatgtctgcagtgctcactgttgtcaccactgcagcgtaatttctggcttttccaggatgtcttggcaaatacgtggtggcagccacagcatacaatttatatagaatgaggttcaaaatagcagcattgataagtattcagatattttaattgtatttggaataacaattttctatcctacttttattagccagaatgatctttagatatttcaaattgacctgtagtactgtgttattgacctgtaatccattgtggagcgaaagcagtgatttggccgtatggagacaggatatggtaatacaggggtgtgtggaattggtgatctgtcccagctctggctttgaactcaaccatattcctggctctgtcttcaaaccataaattcaaaatcagatcccagtggagctagtacatggcagaaaagcaccacagattctgagctcgttttgaacacagtaatggttgtatgcaacccacaactggaataacgctttgtatgcaactcacaactggaataatgctatctcttgttcctggcaataaaacatgcatgaactggaaatgagatctagtgtcttgtatcagcaatagtacagattgagtgatttaggtcaactaattactgcagaaatgactgtaatggcctgtacacaccaggggacgtgtctgagacatgggtgttcagctcaccccatttcatggtgaactcttaggaatgagctggagttgttttgcatttgtacccagtagacaggtaggcacatgatatctctccaggacagttaggacaggacaagaagacatccaaactcttagagatacatctttaagcatttaggggtaaagatttataacatgtgcctctgactttcaaatagtccattactatatatatatatatatatatatatagagagagagagagagagagagagagagagaaagcgagagaaacaaatatttcacaatgttaacaattggtgaatctccaggtgagggacatatggtatttattgtactactcttttttacttttctataggtttaaaattttccaagctaaaaaattttaaatacaccctcctttgcaggctcagtgaaattaaggagaagatggatttatttaaaaatagagttaagaggagatgataacaagagaagaaatgaaaaggaagctggcagaaccaagaaaagatgttaaggagaaaaataaaaccattgcgcaactgaagaccgcatgtaggcactgcttgagaaaaacacactatgtagagggaaaggacatgaaatgaaagtgattagagagaagaggagagatgtaggggacagacaacttcagcaagctcacatcaggatgttatccattcagtcatgcatccatttggtattcattcagcaactgctaaatgttaggtcctatgtcaggaatcaaggatgcaaagtacccccaagaagctcagaaggagtagaaggatgttaccagatgctgggaagggtactggggtagggggcggtgaggtggggatggttaatgggtacaaaaaacaggaagaatgagtaagatcaactatttgatagcacaacagggtgactacagccaataataacttaaatgtgcctttaaaaataactaagagtataattggattgtttgtaacgcaattataaaagcttgaggggatggattccccattctccatgacgtgattattaaacattgcatgcctgtatcaagatatctcatgtaccccataaatatgtgtacctaataggcacccacaaaaattaaaaattaaaaaattttaaaagggaagctgagaagaagtagagaaagcaaccactaacaagcagagcacagcctgttcaatctctaatagaggtgtgctccgcaaaaccccagggaatagagaagacagagtacaaatctgtctagggtagggactgtacttgtttgctgtggccgttgtaccaaattaccacaaaacatggtggcttaacataacacaatttattctctcacagttctggaggctagaagtccaaattcaactttattgggctgaaatcaaagagtcaggaggatacctgtgatggcatttaggcccacctgggtgagccaggacactctctccatctcaagatccttacttgaatcacatctgcaaagccctctttctgccaggcaaggtaacattcaaagaagactttgggatctagatgcagatatcttttgctgggggatctttgttcagcctactccagggatggagttagggaagcctcgcagggtgatatctcaccagggtgagtgcattccggcaaagggcagggcaagtacaggggcccaaggtgcagcaaacaaggggccctgcaggcctgaaagcagaggactgcagtatagctggtctggagaggcaagcaggagatgttctgtgccacggatccgtaggcggtgctaagacacaaagaactcaaagaacacaaagatacaaactagagaaggataagtccaggtttggcttttggaagactcatcctagctgcagtgtggaggatggactggcaaggagaccagggaacaggaagaccaagcaggagatagatctaggagttcagacaagaagtaggggcaatgaggatagttaattaaaacagggtcctaaagaaacaataccagctgggcgtggtggcacgcacctgtagtcccggctactcaggagactgaggtgggaagatcacttcagcccagcagtttgaggctgcagtgagctatgattgtaccactgcatccagcctgggcaacagagtgagaccctgtctctaaaaacaaaaaagaaaagaaaaaagaaacaatattcatagcagcaaacattggagacaatctgaactacggtaatgctttttagattactgggtgggttgtgctatttttaccactaatctcctttgttcttgtagataattgagttgtctgcaatactaacacaaaccgagttaaaactataatcctatatgtgaaaaagaagaaagaaaaattttcagtcaggagcagatttttaatttgttatcttggttattgtatgctattgggttgttgtgtccctatcctgagaaagctgtacaacaccagatccaaatcgggttatttaaaagccaacataaaggctcagggttacataacacagtacatcattgctattctacaagctgtttcatgccaatttttaatcaaccttaaagcctaggcagaaaaccccaacatattgccttcccatgcaattaagaacgattacatttgtcttttactagggaacacatttatttatataattgtacattctttgtttttaaaaacaaaatttcattaagaataagcctgagttttactaagaagccaccaggttttttcatttctgagaaatgtaagtctcagcagagcaaatttatggaaaaagcaatacatttaataacacaccctttgagggcttttaacactttgtcaaatggagagcaacaatagtcaagaaaaggtgagattccagttaaggaagtcttaaacttggttctattacaaaacagcttaatcctgtataatattggggaggaaatttttgaaacaaaaacagacatgctgaacacaaagaatgccactgtctatgtccaggtcaatatagggccttataattttcatgttttacaagaacatgtttattataatagttttaacaacccataatcctttgtttccaaagaagcaggattgcaggccaccttttgcaggcccagcccaggtttggaacaaggcttcctctgcaaaagctggatgctgtgagctctgtcagctgcaatgctctaccccacacctgcctgggtttccggagtgcatactctatttgggagcaatgcctgccttgaactccaacagtattttgtcagcatctttccccaaagactaaactctacagcctatatcaagtatcagccactgggtgagtttctgccttgatatggggagggattgtgatgatgttgccactcactcactgatctctgccagagactcctgaggccctcaccacccaccagattagacctttctgaaatcgaggcagacaatcaagttcaagtgtgctataccccttagacattgtgacttgggctcttcacaacctctaaagggccaatcctcacagccaggctaatttcctcatccccaagcccactattcctggcaaaagcctcacatcctactggcatagcagccaggtcccaacacagctcatggtcaatgctcatatgacacccacacgattcactgatggcaattgtcatttgggtcaaactgcccatttctctaccattgtgactccagcggccatatccaaatgtatatcacaatgtttcctcttctgctttggctctcttgttcacaatcacaaaacagtaccatgttagttctggaagtttaatgtaaatagctcaccaggttatataaggaaggtgacttctaaccactctttcaaatgtttttcaagtatttctaaggcattctctctctctctctctctcacacacacacacacacacacacatacacacacaatgtatattacaaaaaatacagctactttttgaggtcatagtccatgttttctgactctttggtaacactgccttatagagaaggcctctctgcttacggtttttcttgaatggaatgttggttacattttggaccctcattgattcactgacccagcctaatgtgggctgtgataagagggaacacaatgcagacagccccaaaacagccctggaacgatcagagccctgcaagtccagaggctgaagaggaaataaagacccccagaattcacaggattcacctcaaacttgaatgagatattcacaatgctaacatgacccctaggactctatacagcattatattttcacaccataacctaagtcagctaaatgcactaaacttgtcctacctactgaagaggtgtttgttgatgagaaattgccaagcaagaagcaagatagagaccaagcagaggacactacctttgccatttattccctttaatttttctatcagtaagaataagtagaggcctttctagaattccttgggggtaaggagagatatatttagaacttggaaatagtcactgcttagggatgatgcttttgaaaatatttcagaaattaaacctataatctaagcttctaaggagagtactgttcaggtcccaccaacaaagacaaggcagagtaagtgggttattctggggagccgctcatgtgagccaggacacagaaatgaaaggtcctgggtgagctgggagtggtgttagcccaagggtgtcccatgaagacaaaaatccataggaggaggacttgagcccacctgtggggacattgctgttggggcatacagtgccctttctcttgtttacaggactcctatttcaggtgggtgtccagtccttctcaagggtgcccatgtgctttgggaacactaagcctggtaactccagccttggcgactggtatgagacaggacatggtcttaacatcatccaatcagactaaagcccatgttttttcactagtggttgagaaagtcaagctctttcttccaggggggtgaaaggaagtatgtaccctagaggggcgagcctgctaaaagtggaaccaacaaccctgaagaacaaaagttgaaaatgagagtgaggaactgagcattcaccatatttttaaagcccccctggatggaggcttgactgaacctagagttcttctggccttttacatcatccaaatggattactttcttttcttatttaagtcagttaaagttagtttctttctttcttttttttttgtaacttgcaacctaaagcctcttaacttacaaagcattcatggtagggaagccgaattcaaagaccagaagagagactgactcctcttgcaagctaaagaaatcaggtcaatagtccaagttcctgaaggaggaaacaatttgagagttgcaaagaaggtgaagtggggtcaagtgatgaaatggtttaaatgtgtcccccaaagttcatgtgttggaaacttaatctccaatgcaacagtattgaaggtgtgacctttatgaggtgatgaggtcatgagggctgtgccttcatgagcggattaatgtctttgtttctggagtaggtttcttataaaagcaactttggccctctcttgctttctcttgcacattctttcaccatgtgatgccttccctcatgttatgacacagcaagaaggcccttaccagatgcagcccctggaccttggacttctcagcctccagaaccatgagccaaataaacttctattgtttatcaattacccagtctgtggtatactattatagcagctcaaaaaagactaagctgatttagggaaccagtgctgaggccacaggcaagcagccagacactcattttatgcagacctggtatgacctgccaagctcagggtgggtctctgaagaagtcatgttggggcaaatgcaatcttcagtgaggcatggagctcataactaaatatatgttagcccatatttacattagggatcagtcagcacctcctgatatgtgccaaagatggcaagataccttgttgaggctaggcatggtggctcatacctgtaatcccagcactttgggagtccgagacaggtggatcacctgaggtcaggagtttgagaccagcctggccaacatggtgaaaccctgtctctactaaaaatacaaaaattatctgggcgtggtggtacacgcctgtagtcccagctactcaggaggctgcggcaggagaatcacttgaacccaggaggcagaggttgcagcgagctgagatcatacaactgcaactgcactccagcctgagtgacagagtgagactctgtcaaaaaaaaaaaaaaaaaaaaaaccaaaaacaaacaaacacgttgagactgaccaagggctgggaaagtgacatggtgaggcaaatgtgtagtgtgtacatcctgagagctatatggaggggcagtagagtgctatctgtcaggcctcatgcaattaggacgctttggtgggccatgacagactgggtgaagagatttgactttatgtaaaatgtaagtctattggaacataggatggggaagggggtagttaacagaagttataaatggaatagaggaatatcggtctttcaggaaaaaaaaacaagctaaaataaatggcacaaagtcttatgttaacactaaatgagctttcctaggctggggtggtggtcctactggttggttaaactacagtcagggtctatgaaatatgatgacactattgccaccaaacacctctatcagctgttcccagtgctacacgcaccacctttctaacctagaagtctggaaagtggctgaagacatgggaagaatctctgccttagtacttcgagatatcaagtgctccaattagaaaatgactctcattaggaagtgttctgaaatgtgactgaaagggaggcaaacatcaaagagcgtgaggaaggcactagatgcagagaaatagtggttatggtttaaagaaagcaaagttacattaaataactgacataatttttcttatttccatttgcaatgagctgagtccaaaaattactgattattagatatatatttttatgacatgtcctataatataggttgattgcaatgtaataatagctagtgtttattgggtacttgctatgtgtctggcattttgctaactatttgacatgcattatcttattttgtgcctacaacaactctataaggtacatatgtattattattatttccatttatatagagaaagccgagaaatggagaaattgagaaacttggcaacacatccagtaaagagctgaagcttttataacagcacaatacaggaacaaaaaggatagctttggggaatgccagcctttccaaggtaagttatcaaatgtcagtgtgaacaatcatcaacactggaaaaagaaattgtttaattctcataagctaacaaaatgaatatgacataccatttcccatgctacctaggtgaagcatgcaagttgaatagtcatagcaatgctagtattattttttattttatacatatatattttttaattattatactttaagttttagggtacatgtgcacattgtgcaggttagttacatatgtatacatgtgccatgctggtgcactgcacccactaactcgtcatctagcattaggtatatctcccaatgctatccttctcccctccccccaccccacaacagtccccagagtgtgatattccctttcctgtgtccatgtgatctcattgttcaattcccacctatgagtgagaatatgtggtgtttggttttttgttcttgcgatagtttactgagaatgatgatttccaatttcatccatgtccctacaaaggacatgaactcatcattttttatggctgcatagtattccatggtgtatatatgccacattttcttaatccagtctatcattgttggacatttgggttggttccaagtctttgctatcgtgaataatgctgcaataaacatacgtgtgcatgtgtctttatagcagcatgatttatagtcctttgggtatatacccagtaatgggatggctgggtcaaatggtatttccagttctagatccctgaggaatcgccacactgacttccacaatggttgaactagtttacagtcccaccaacagtgtaaaagtgttcctatttctccacatcctctccagcacctgttgtttcctgactttttaatgattgccattctaactggtgtgagatggtatctcattgtggtattacatagacaactgtgaagataattattttgatgagtaaattactacaataaattgtcatacgggaaatatccagatcaagaatagaaattgggtccccacacaaaccctccctttccctcctcccatcacaaccctctctcttccccagaggaatcgctggcctgactttgtggcaatcactttcttgcttttccttatagctttatcacccaagtgtgtgctcccaaatactatagtaaatggtgtctttttctgctgtgtcttttaggtctattttaatctataggtcatccaactatccattttttccacttttttcctcataaaaatgattttttaagaaaccctaaatactatagtaaatggtgtctttttctgctgtgtcttttaggtctattttaatctataggtcatccaactatccatttttcccctttttttcctcatataaatgattttttaagaaaccaggccatgtatgctgtaatctggcagtttcccatagcctggattcagctgattgcatcaatgcgaatattataactatgtagcatgactcaagccataaggagggtatcaggtagatttaaatggaaatatctagtctgccacatatacaagtatattaaaactcagttcctctaacaagggccccggggacttatttattgatttacaaaagttttgaacagttgctttgaggtaatctcttaatctctttcttcctccctcttccttcttcttgcttttttttttttctttttaagggacagcatcgttctatgttgcccaggctggtcttgaactcttgggctcaagagatcctcctgtctcagcctcctgagtagctgggactacaggcacgagctaccatgcttggcttcttgctgccttatacatacatctcctagaaaatctgataaaggaaaaaatgtcacattggatacataaggaagggaacaaaatcaagtataaacaaaacaaaatagaaaaaggatttttcttaggaaggaaatggaaaggaccagcaagcaacctctactcagccctttgattatttgaaagttttgcactattctttctttaagggatagtcatatgcagctactagtagaaaagagatagatggtagcaaagcaaaattaataaaagggtaatataaaactcagcatgatttttctcaagtccagcaagacagaagccttaatcattttcccctcgcatggactcttaccacattgttttcaagccttagtttctagcaatggccttcaggcatggaataaaagtagttttgcagttaaacccacttgctgtaagatcttggggcaagatatttaacacaagtgtccttacatgagcagtgaggataacacataccttttgaggttgaggggggctcaaatgagataacagctataaagtgtcacatagtaaatgcataacaaatgtcagtctcctcactgtcctcctccctgccaagttgtatcaattttcccttaaatatgttgactttaaaatccaagccattgaaaatcaaaagttcaaagaaagggcataaaaaatcctgaagtttcatctcaccctatgcagaataaacctttctgactatgtccttgtgaatttagacatttaacaatatgcataaacttaaagaaccaacaacaaaatcctccttctcattatttcccacattttccctcttctgtccattctctctacaaacttcgctggtttggctcttatttattcaaccacatagcatgagggaagctggagatcttttggtccaactttaatttttaccaataaggaaactgacatccagaggaattaagtgacttgtccaagtatgctagttaacagcagaggtgacagactctagcactggttgcaaattaaatgcctatgttttgaaatttcacatggaccgcataaatatgtacaagtattatgtatccataaaaattaaaaaatctttaaaaatgcatatgggggtcagtaggtaaaagaaaagagaaccaagagagctgcagcggggagcacagcttgctttaaacatgagatccagctcagtgatcatgcgggggaaaaggcccggcattgctggaactcctaatatttaaaaagatgatggaaacttgaaattttatatttaatcttctcatttttaagtgttggcaatgtattgaagactttgaagcctctctgctggtcaaacaagatgtatctgtaggctggatttagtccacagctggccagtttgaaaactgaatcctgctagccttaatttaaatttttttaaatttaatttgctttgattcctgcactcctgctcaaaaaaatcttcaatggctccccactgtctgcaaggtaaagtccaaactttgtcaccagtccttcaaagcaacccatgactatatccaagaccccaaaccatatttctaccttatagtcagtctccatcttccaccgcaaccagaatgatagttgaattgtactctaggaaggaaaatattcagaaaggcaccagtcctggccatgagggctgcttctgggtccctaagctttttcctttcctgcagtgccctacactgtgcatgcctatcaatgaaaccctgtccatcattaaccatccagctcaaataccacctctccacaaaacatccctgatggcccagccaaatgcccctttgctctgaatttccatgggactttatatcactcacatgacacttacaacatactgccttgttttggcattacctacatagctcattttcccaaacacctaataatattcacagaaggaagagtttgggttttgcactatattgaatatccctgtagtgctttgtacatagcatggagctcaataaacatcttgggaacattatccttctctactgaaaacttgtggatcaaacataaagtgccttttgtttacctgtcacaactccatcacttctatacttctataggccaggcttttcaccaagcacacagcgtctgagtagtgcaaagggcaaagacttcacttccctgctcctaagacatcttcccccactgaactactacttttgagttgctttgaggtttcttcctccagaagcactcacacctttgtcttagacaacattgattctaagtggccactgttaaacatgtattacatgaaagcattccagggaagtttgtctttttctatgtagtaaggttaattgatcagatttgatgataatcactttggaagggataaagggacagagaactaggctatcagccaacacacactgtgcaaatattttagttgtgataaaaccaatggaggcaagcaaataagcatcattaagctgtggctagttagcaaccaacattcattttgattgtgggagtgacacatttatatctcacactttgtttttctgtatccacacccattttcagccatttctattcagtgtcaaaaaagacaagaaaaattagactcaattttatttttactggcctggacaacaccagaggcactcaataaaatgcttctcgagtaaactttttaaaaattaatttttacttttgcttaacacaaatgcaattactgaaaagataaaataccaccatcttataagagggcctaaatttgcacaataatggcaaaacttgatacagttttatctcaaaccagcaaagtttagatgtcagctcagtaatttcaattagcacattctggatacatcctttctaacctgtacaaatacacactgtcaaaggcaaattaagccttgcaaacagtatttatttgcctcacatttatgtcacatgataatctgtgtttggatatcagacagccaagacaatcaagaattccaggaaatgtcaaagaaaactaatgactacagaggtttccactgtgaaaacaatgtcctgtttttggatgatcacatctgctaaccctctattttttttttttttttaatcaagaggggatagataactcattcttaaacttatattgggaatacttctaataaaagaataatataatagatagattcaagttcccataaaaatgatgcttttctttgtaattcctgtgggtagaagaaaggagaaatggggttggattacaaacattgatcaagaggctctgagtaccctcatttttcctatttttatatcttttatgatgaaatgacttaaagcaatactctcccctcttgaaaactaataaagtgaacatgcttatttatcttacttattctttatacaaatatattctcttctgcattcagaaattaatatttagaacacttcaggcataaaaggaatccagatctttgataattggttaaactctccgatttaggacaacagcaacaaatattttctgattatattgttgcaaaaataaaagtatccatggttttgttaaagaacaagaacaaagtaacacatttaatgaaaacaggaggaagcctggaatccaccgtgataaaacttagttgcaatatgaacgctgctagaggaagggctggccagaacacttcctcatcttaaaccaagccaaaaataaatgggcggctccaagtccctttgattttgttaaatgtatatttccagtgtaaactggcgttgtttaagttaacaaagttttcccaaagggccggtgggaaagaatgagagtcctgcaaatgcaacctgagaaaatgtgttcctcgcacggaaatggaagagctgtgttgagataccagggacacacgcagggcatctgcgcgaggtgacattaggctgcccttaatgagttttctgcttctgataacagggtgtcacttttttcttttcttttaactgtaaaaggatcctggggtgaaaatgagtgaattgcccccacactcctagattccttccgggagaagagggcggacgcaggctggggaggcgggatcgggacccggaggtcccaggaacgggtggctgaggtcaaggccgaagacctgggcgcccactcccagtgccgggtgcccgggagaggaagactgggcggacccccgcgcttccggatgaggcggacttaggtcaatgcgggaaacattgcatgtcacctcttcccactcggagaggccgggtgtcttcctgagagctggcaggaaagcggccgaggcgcagaggcgcccggagccagccgccctggccgcgtccccaccgggctgcggtggctgcggggcggcccttacctggttcctgcggtaccagtcgcccgagagggagccgttgccggcgcctggtgccccgtacgtgaaattcagtgacagctcgtccagggcggccgaggcggagtccccggggcccgcgggcgccaccgctgccatgaggtctcgctcccggcgctcgggctccggctcgggctgcggccgcctccccgccctgttgcaccgcgaggaggccgcgccgcagccacttcctgctcggtgcccgggcgaggcgggcgcgccgaggccacctggctcccgcccccgcgcggccgtaggtgctcccagcctggccgggcgctgcctcctctcctcctccggtgcgaggtgtcctcggggagcccggcggtctgcggcctcccggggccgtccagctcgcaccgcgccctccttccgctgggccagtgtctgcatcctcggggccgcactgcccaagggggcaatccccgcggccgtccgcaacgggtccccgcgcctgtcggggccagaatcagatcatctccgttgtaaacatttgtccaagtcaatggaagaggaggagacactgactaacccaaagcagctatcatctcccatctctacctggcaattccagtcctctatcacatatgtagtgtttctcaccgatattttaaaaattgattgcatatgaaaaagtcatgagttcccagaaatattgtaagcaatatgagaaaaaaagatccgagcgattgaatctcagtgccagtgcttgatagatccttagtaaatattccttgaatgaggaatgtggtagccataggaccccagtgtgcgatgactggattgggtttgcttcagatgggatcaggtggagttgctgaaaagttgccagctactgtatatatgaatttaggatgaaagataaatgttgttattaatcttaagaactctaacgagatgttctggttttacctgtattcaaattctaatgtgtgaccacaaatgatctgtagggtatttctcactttaaaaaaaccatgattctatactgttgcctgaaggctgatagttgccttcttttgtttacacaatgctgaggtttttcttagataatgtgctttgacttccatgagttcatgaaagagagaccttcaagaaaagagaattgctgcctagaagggagcagggacagttttcagtgtttcttaggggaaatgtgcaaatgagagaaaagagtgagaaaaagtcatttcacatacagaaaaaacaagacatgtcgtctcagaaattgtgtagtttcttgcttaagcactcgagatgttcagtgaacagctaacaattgtaggtaactattcccaattttaagaggctgatttacttcaaataaatatctgaaggaaaaaggtctctatttgttatattacattttattttattttttgagacagggtcttgctctgttgcccaggctggagtgcagtggtgtgatcttgactcactttagcctcatattcctgggcccaagtgatcctcccacctgggactacatacaggtgcatgccaccatgcccagctaattttttttttttttagatagagtctctctctcttgcccaggctgcagtgcagtggcacaatctcagctcactgcaacctctgcctcctgggttcaaacaatgctcctgcctcagcctcctgagtagctgggactacacgtgcacaccaccaagcccggctaatttttgtatttttagtagagacagggtttcacggtgttggtcaggctggcctcaagctcctaacctccagtgatccccctgtcttggcctcccaaagtgctgggattacaggtgtgagccaccacacctggccctggctaatatttttctatttttttgtagggacagggtctcgcaatttttcctaggctggtctagaactcctggcctcaaacagttgtcccacctcggcctcccaaagtggtgggattacaggtgtgagctgccatgccttgtctgataagttttctataacatcacattcattgatattggtgacttcattaatgcttctttctcttcacatgctttagggtgcaagtaacagagtatccaaataaaagtggcttaaacaataattatctgctatctccagaggaatgtgtctctatgtggttctattatgtcgtcacttccacctttctgctctgctatccctgaggtactggtcttgtccattgagggaggaaagccttttccagaatcctcctggcatcctttcacctcagatcccattggctgggactgggtcacatgcccatgttctaccagcaagggaggctgggaaagtgattcttgggtatttccaacctagtgagaggtaagctctaccaaccaggatgagtgggaatgccatggggttatgggggaggggaaccagtcaaccctggtacaaccactctagtatttttctatcagccagattgtaagtagttgtacagttgctaacaagcaaaatactaaatggattgtgttactttctggtttaaaatgccttgaagcctccctattgccataatgaagtccacactttttttttttttgagacagagtcttgctctgtcacccaggctggagtgcagtggcacaatctcggctcactgcaagctccgcctcccgagttcacgccattctcctgcctcagcctcctgagtagctgggactacagatgcccgccaccacgcccagctaattttttgtatttttagtagagtctgggtttcatcgtgttagccaggatggtctcgatctcctgacctcatgatccacccacctcagcctcccaaagtgctgggattacaggcgtgagtcaccacgcccagacaatttttttttttttttaattttttgtagagatggggtctcattatgtttcccaggctggtctagaactcctggcctcaaacaattcagtgagacttctgaataaaactaagtttaattctttaaaagcttgatttttttccctttagttgatactctgctatactcaacttgttcccattttatttcttaatttaaaaaaacattttcaatttctttacatttgtttaaaacctctaattttggaggaagatggtacatgatgcagagaagatttgatgtacagcctaccacgtggtgttctctagattccaagatgtcactgctgttgctgctgtcctagtgtgtgtgggtggttgaaacgaagaattcgtgaccagcgttccttcccacacagttcacaaggaggcggcaggaatgccatgtgaactattttggtcccagcagtgtaggcagagctgtggagattgttccgtactttgtgacggcctctacctctcgtgggatttcttcaggggatatcctgttcactttacgggatgccaaaagctaaaaaaagggctgaaacgtggaagtctgtcttcctcagttaatttgaagaactctactctggtgccaaatcatttacttagagagcagggttagattttgcctaccttgcctgggatcagtcactggcagcattaacaaaacagcttttttttttctctcaactttttttttagatacaggggtacatgtgcaggtttgttacatgggtttcttgcaaccaagtagtgagcatagtaccagtaggtagtttttccacctgtgccctcctccttccctcccctctctagtagtccgcattgttgattgttcccatgaataaaatgttttttttaaaattcatctctagcacaattcagtcaatactagttgtgttacaataagcattactcaagttaggagcttttaaggggccaaagtagagaagggtatggattaattcaggtatctcacatcataagccaagtccagattagagactttgatgagagaggcgaaactttgaatcttatagaataacatatgacatcatctctataaacaacagtttggcaattgttaaagtgcaaacacaaggcagactgtctgggttcaaatcctgactccactgcttatttgctgtatgacctcatctagttgctcaatttctctgagccttgtctttatcacctgtaaaagggagatgataaggagtacccgaaacatagaaagtactcaataggtgccggctataaccttacaatagggaagcatcccttaaacaaattaaaaaatacaatccacatagacaaagattcataagtgcaattacaataaaactaagaacttttttttttttcgagacagggtcttgctctgttgcccaggctggagtgcagtggtacaattttggcaggacgaagtcttgatctcccaggctcaatccatcctcccacctcagcctcatgagtagctgggactacaggctcacaccatgacgcccagctaatttttgggtttttttgtagaaatggggtttcaccatgttgcccaggctggtctcaaactcctgggctcaagcaatctgcctacttggcctcccaaagtgcgggtttacaggcatgagccaccatgcccagccaaactaagaacttttatacatcaataggcaccataaagtgtaaaaagataagtcagaaactgagaatcttaatacaaaaatactagccaggcatggtggcgcatgcctgtagtctcagctacttggggaggctgaggcaggaggatcacctgagcccgggaggtcaaggctgccctgagctgtgatcatgctactacactccagcctgggcaatagagtgagaccctgccacaaaaaacaaaacaaaacaaaacaaaacaaaagtcaaactcagaacttttatttctcatacatgtgactgaccaaggattcacatccagaatatataaataactccttcaggtcaataagaaaaagtcagacaactggtagaaaaatgggcaaaaatataaacaggtggtcttcataagaaaaactataaatggctaataaacatataaaatacttccatttcaccagtaatcagaaaaatacaaaataatatctccaatgagaaccattttacacctgctggttggcaaaaaaaaaaatttttaatttgcataccaagtgttgataaggatgtggagcaaaagaaactcttatttagtgctgatgctattgacactggaaagagtttgacagtatttggtaaagatgaagatgtacatgtgaatttcactcttatgtacataccccagagaaacttccgtacctggacagcagaagagatgtataagaataacagcactctttgtaacagcaaaacaaacaaacaaacaaacaaacaaacaaacaaaaaactggaagcagctcaaatgtccattagcaggaatagtgggcaaatgaattttgatacatttatataatggaacacagcaatgaaattacctgaatgacaaccacctaacagccacagcaacatggatgaatcccacaaacataataatagcaaatccatagaagattatattcagtattattcaaaagcatgcaaaattagacaatatattgtttagaagtacatctatctatatgtgggaagacctaatgaaaagcaaaggatagaccaggtgctgtggctcatgcctgtaatcccagcattttaggaagcggaggcgagctgatcatttgagctcaggagttcaagacgagcctgggcaacatggtgagatctgtataggtacagtgagccgtgatggctccactgcattctgtcctggggtacagagtgacaccctgtctgaaaaagaaagaaagaaaaagagagagaggaaggaaggaaggaaggggcaaaaaatgataaacacaaaaattctgatagtggttgaaaggtttggcaacgttctattttctaaattgggttatgtgttatatgggcatttgtactattattattcttaaaggtatacacttatgtcaagtgtgcttttttataaccataatatattttacaactaacacaaaaagacccatccagaaaaaaaccgaggttttgtggttagaggtttgaaaagttcaagattggtagacctggattaaagtgtggtcttctgacctttatcagctgtatgactttgggcgaattctctgagattaagtttcctaattcatgaagtgggaatgataatatttatcttaaaggcttttttgaacattaagtaatgtgagctgtatttcagctcagttcaccaaatacttaagtttgtgccaggagcccaggacatgaaattggataaggcatgaggagcttaactggctgtgagcaggcaaacatgccaataggtaggctcaatgttacaagttaacttcagcacaagggtgggaggaaagaaagaagaagcagccagctcaggttgggcaggcaggtgcagcctgggagggctaactagaagaggtgatgactattgagagccctgagatgagttagccacatgaagaagggaggtcaagggtgaacagggcttgcagcaggcagaacacaggcaaagacagcagagtatgtatgtatccacatgaagcaattccacattacccttaggtgatacactaacataaggatagagaggctgacagggccaggaaattgagggctttgtgtgttggatgatcaaggtcagtcttgactcttaacggggaaccactgagtaacttaagataagagggcagcagggcaagcttagagctgtaaaatctcccttgttggaggcacaggtgtggctgggtgtggtttaaggggagaaacacaagataggagacaagttagggactgctatggctcaaatgaggatatatgagaaaggctggggagaaggagagggattaagaaacgtttagaagtaaaattggcatgacctgctgatggggcagggaaaggtgggagaagggagagtctaagattgttgtagttggggctattaagtaaaaaggcagcaccattcactgatgtggggaataggaaagaggaaccagtgtaggggaaccggagtttggtttcaagactcattgaatttgaggaacttgtataatattcaagcaggaaagggtgtacagaatttattctaaggtgcgctggtgaggtcagggccagggaaatagatctgggactcaccagcatacaggtggatgagactggccatggctagcaagtagccaatatcttttagagcagtgttcagcacactttttctgtaaatggccagatagtaaatattttaggttttgtggaccatatggtctctgtcacaactactcaactctgccattgcagcgtgaaagcagccacagacaacatgtgtataaatggatgtggctgtgttccaataaaactttatttacaaaaacagcatgctcactggattcgccccataggccacaatttgctgacccctgttccagatagagtacagaacacaaggccaacaaaaactgcctaagaggtaagagcatggatttttagggttctcagaattcgagacaggatcccagttcaaagggaaatacattaattcctaactacaacctgggaaggcaggggtggagctggactactggatctgggaacctgattgtgccatctgggcttcatcctcagatcagcttcacatggtgagattatggccacaggggctcctgatgccatccttagagtgacaaaggaaagggggagtgtggcagattggactacacagttcttcatgcccccgacacaggaatatttgccttgtacatccccacccattgctcagtgactacaatttctcccacagaggcatcttcccattgatggtgggcttgggcacatgatttgctttggccaatagaaacgtagatggagtgagggtgacaattccaggccaaggtttttagaggcattcctgtgctcctctctgaaaagataactccaaatagccactggtccagggaggaaaaagaaacctgtgaagtggacctaaagccaatcctggctgtcttcaatggagccatatctgacctgtagactcttgggcaagaaaataaatttagattgttaaaaaccactgagattttgaaggtatgtattaagcagcaaaaccaattgattaagggtattcccaaccagcttcagttagaaagttcagggaaaaaaatctctgactggtctgctttgtgacatgtgacccattcctgcaccaatcgctgaggacaggatttggtggtatgattggcccacctggatcatacacccactctattcaaggtgatggggcattatcaaggtgaggaaaagggatgctgagcagataaaagcaattgccaacattgtggaagaccagcatagagcagtgctgtagaaacctggacaggagagaactacaaaaatgaaggtgtgttgaataaagctgtcagctgcagaaagggtactgagacagtaaatgaaatgtgtttattggctttgacaataataggtggtcactggtgatcttttcctgagagtttcagtagagtgttggggtgacagtcagatcatagttaactataaaatttcacaaaactctaattcaccataggaatgtcagttattactgtaaataaccttagataaggaagaggttaggaatcaggggagagccaggagttttatcactttgaagccataggaggcttctgggaaagggatgttgggatcagtccatactcaagggagacaatgctcagagtgggggaaacccattaaggggagtaccaaggctgcacagtcctggtgtgaccctcagggcctgaggcagaattgcatctttgggaaccagacgcaaaggcaggatccaagcaacgtggaatttaaaaacagcagtgagagatgatttgagggaggtagaataggccaagggaggagagagctgataagaatatctggtctcaggcctggagaaacaagaacagatccagccctaaacaaaagtattcaatggacaaaatgttaatctagtgcccaccctgctttaagactgacctttccttgacttattgtgaagcctttttccataaccctccgcaactcctgtcctccctccataccccatcccacctgcatttactgacttctggctatgcagggcttcccaaggctgtgtcccatccaggccagtcctccacagacagcatctcttcccctgccttgtctaaaatcataccgtctcacttcgcattcctttgctctctactttcaaagagtagtctaagaatgaatccatgccaagatatggacataatagatcttctgtgtctatttgctttctaaatggactctcctggcaacacaagatcttaacccaaaggagtatatcagtcatggtaagaatttggatagatggaggtgggaagggcaaaattgcccctcaaatcttactacataataggtttgttactgtgaaggctgcttgtgaattggagaaatattgaggggaatgagataaaaaccttaattttagaaataaaatatttaatttggggtgatgacacaacagatcttagatgtaattggtaaatgaaaaatcccctggagtgagaaatatagaggtagacaaatggccacaggtcagaggtcaagaggtagttactggctaggcttagtggctcatgcctgtaattccagcactttgggaggccaaggtcagaggattgcttgagcccaggagtttggagaccagcttgggtagcatagtgagacctcgtctctacaaaataagagaaattagctgggtgtggtggcatgtgcctgtggtcccagctacctgggagtctgagaggaagatgactggaggctgggaggttgaggctgcagtgagccatgatcatgccactgcactccggcctgggcaacagagcaagaccctgtctcaaaaaaaaaaaaaaaaaaaaaaaaaagaagtagtcagccacatcatagtattatctttcccttccagttcatagtttacaaatactgtcacctctattatttcatttgattctttcaaaagctctgtaaagtaagcagaacatttgtgtttttagaaagcatttttatgtcttgtatttttatttatttttaattgatacataatatttgtatatatttatgaggtacatgtgatattttgttacatgcatagaatgtgaaatgatcaggtcagggcatttacggtatccatcaccctgattttttgatcatttctatgtattgggaacatttaaactcttctcttctagctattttgaaatatacaatacattgttgttaactatagtcaccctactctgctgtccaatgttagaactaatttcttctacctaattgtatgtttgtacctattaaccaacctctcttcattaaaatttgaattaaaaattctttttcagagtctcactctgtttcccaggctggagtgcagtggcaaaatcttggctcactgcaacctccgcctcccagattcaaacgattctcatgcttcagcctcccaagtagctgggattacaggcaccaccacacccagctaatttttttttttttttaatttttagtggagatggggttttgctatgtgctatgttggccaggttggtcttgaactccaggcctcaagtgatccacccgccttggcctcccaaaatgcttggattataggcatgagccaccatgcctggtgaaaatttgcatttttaaaaagcaaaagcaaacacctcagcttagagaaactaaattatttacctaatgttcactgctggtttgtggtggagccaagacttctgctgctcaatgaagatgtccaggtagaagcgtatactaatcagggctcttcagagaaacagagctaataggagataggcatacacacatgcacacgcacacagacttatgatgaggaattggctcacatgattatgaaggtgaagtcccaagatctatagttggcaaactgaacaccctaaagagccaatggtgcagtttcagtctgagtctgaaggcctgagaaccaggagagtcagtggggtaggttccagcccaaaagtgggcaggcctgagtcccaagaagagctgatttttcagttagatttcaaaggcaggaaatgacccatgttccagctcaagccatcaggcagcaggggttccctctgactcagtctttttgttctattcaggtcttcagtcaactgatgagacccacccacattagggagcatagtctgctgtactcagtctaccaattcagctatgaagctcctccagaaactcccgcacagccacatcccaaataatgtttggccaaatgtctgggtaccctgtggcccggtcaagtggacacatgaaagtcaccatcacagtggggtcctcaaggaaaggaatgaaagagacaatccagctttgcatttagcactgatgcaatggcctgtgaaaccagacgtgacaaacgtggcaagtagaagtgtcacagacataaatttgagcatttctcagatttttctttgcctggagtttgatctcaatagtcattcaatttgtcccttaggacaaatttattttctctctttcttctctcctcattctcctccatcaccattatcatcatcattgtcactgtcataatcaacatccaaagtgtatggagtgcctgcactcacgtggctctgtaccaagaaggaatttggaattcatggaggaaaatggatctgtcccttgctgtaagtggcttaattccagtttaagagacagaacatacataaaaagataaataagtataaatcaactaggaactcgataactaagtgctaaatacaggaggatatgaatcttggattccaaaaaaaggagtgattttcgggctggacagggtctggaaaagcttcaaggaggtcgaggttcttgagcagggcctgagaaaagagtgtggctgacgcaagtgtgacaaggagagagtatggcaggaatatagaacacccagagggaagtgggaagtgcaaatgtgtgtgcagggacagcgagtcatggctgggtgggcacccgtgccatggaacagcttgatgcctggagagcaactcccagaaacagcttttggcccagattgctaattagaattttttactgtgtgtgaaatttccaggatcagcatggagtgtcatctgcgtctcctgcaggcgtctcctcccaaacacggcttcctaaacctgtcttgccagtcaagccccacagctgctctgccgagttatacaggcttcctctaaaaagctgttctcctggacttgcatgtgcttaaagggaagaaaagcaaggaaagcgaaaccctccacttgtttccaggttctgagcgaatcttgtttttatactatttgtcctgttatctggatccacagcactggtgtgtcttagacgataaggaaagcagggactactccagtagttctctctgcagggccctgctgtgtgctgtggcctctctgggttcttcacgagtgccttggggttgtgatgaaaactacatgtgtaatgaggcagagtaagctttgcctcctgtcaaccaatagggcaccccctagcaattcccccccaaacacacacaccgccctgaaattccccaaggccctcatttgggtgctcctgggggcagggagggttatgaagagaggcatacactgtgcaaagcagcacgtgctccaggtctggttctgccaccaactagctgggtgaccttgggcaagttcctgtatctccctgggcctcatctgtgaaatgagaggcttggactatatcattccaaatgtttccaactctgaagtatgagtctagaacttttatcttcttcacattatagcagattttttttttttttaacccctggctacttaggggaagagagaatggctctagaaggtactaatccgtcttcctacaacatcttgggatatctggtagtcgctagtcaaagagggttagttttccccccccaatttttccttcttttttctccttctttctttctctccttcctttcttccttccttccttcctctctcattctcctcttccctccccctccctctctctttctctctttcttcctctcctctgcgctctcccttttcccctctcccctctcctctcctctccttttatttatttatgtatttatttatttatttattatactttaagttttagggtacatgtgcacattgtgcaggttagttacatatgtatacatgtgccatgctggtgcgctgcacccactaactcatcatctagcattaggtatatctcccaatgctatccctcccccatccccccaccccaccacagtccccagagtgtgatattccccttcctgtgtccatgtgatctcattgttcaattcccacctatgagtgagaatatgcagtgtttggttttttgttcttgtgatagtttactgagaatgatgatttccaatttcatccatgtccctacaaaggacatgaactcatcattttttatggctgcatagtattccatggtgtatatgtgccacgttttcttaatccagtctatcattgttggacatttgggttggttccaagtctttgctattgtgaataatgccgcaataaacatacgtgtgcatgtgtctttataacagcatgatttatagtcctttgggtatatacccagtaatgggatggctgggtcaaatggtatttctagttctagatccctgaggaatcgccacaccgacttccacaatggttgaactagtctacagtcccaccaacagtgtaaaagtgttcctatttctccacatcctctccagcacctgttgtttcctgactttttaatgattgccattctaactggtgtgaaatggtatctcattgtggttttgatttgcatttccctgatggccagtgatgatgagcattttttcatgtgttttttggctgcataaatgtcttcttttgagaagtgtctgttcatgtcctttgcccactttttgatggggttgtttgtttttttcttgtaaatttgtttgagttcattgtagattctggatattagccctttgtcagatgagtaggttgtgaaaattttctcccattttgtaggttgcctgtccgctctgatggtagtttcttttgctgtgcagaagctctttagtttaattagatcccatttgtcaattttgtcttttgttgccattgcttttggtgttttggacatgaagtccttgcccatgcctatgtcccgaatggtaatgcctaggttttcttctagggtttttatggttttaggtctaatgtttaaatctttaatccatcttgaattgatttttgtataaggtgtaaggaagggatccagtttcagccatatgtagaaagctgaaactggatcctctccttttctttgagacaggggcttgctctgtgccccaggctggagtatagcggcacaattacggctcactgcaacctcggcctcctgggctcacgtgatcgtcccacttcagtctctcgagtagctgggactacaggggactacaggtgttcaccaacacaccaagctaagaaggctagcttttatcttccacacgtttaaaatataccttttttaattttaatttttatttttttgagacagcatcttgttctgttgcccaggctgaagtgcagtggtgcaatctcggctcactgcagcctccgcctcccaggttcaaatgattctcatgcctcaccttcccaagtagctgagattataagcacgccaccacacctggctattattgtgtgtgtgcatttttatggagatggggttttgccatgttggccaggcaggtctcaaactcctggcctcaagtgatctgcccgcttcggcctcccaaagtgctggggttacaggcagtgccaccaacatatatatttttatgggaactttagagagatggaatatttaaagaactttacatgtaagaggactaagattcaaataatgttgccacagtttagtagctccatgatcttggctgggttatttcacttttctgggattcagtttcctcagttgtaaaatagcaacaggccaggtgcagtggctcacgcctgtaatcccagcactttggaaggctaaggcaggaggatctcttgaagccaggagttcaagaccagcctaggcaacaaagtgagagacccgtgccatccccccccacaccgcccctgccctctctctctaaaaaaagaaagttagccagtgtagtatgtgtatagtggttagctgtggaacactgcattcaggcagatctgggtttcaattcgggctctgtttctgaccatctgtttggctttgggcaacttattttacttcccaatcctcagtttactcctttttacaggaataataatagttcctgctttgtagggtgattgattaatgaggattccaggagacaaggaattaaaagtgcctgatacagagtaaacattcaatacatttagtcatgatgaaaaacaaataaatatcaaatgtcatgcttccctatccattctcctccaaagacagcagtagcagaaactctcctgatgaagggagagactgaatcacgtagctagagagcaagcttgaggagggcaggaccacctttgcctggtttatcctgtagccccaacacctagcacagtgtccagcacatagagcactaggaagaaatcctttacaatggtgcaaacaagacagagatgctcataaatcattctacctttacaagatatgcttacgtttcaggttttcagatttgttccattgctgccttaatagctccacctgttactgagccaaacctgggtccgctcaccctgcacactaaagacaaacaccctcaccgaggtttgcagtgagggaaaggagggcatttatttacaggacaccaaggaataagaattgggcagcttgtgcttaagactgcctgctgacttacaggcaaaggtttttaaaggcaggggtacacttcaggaaagcagaagtgaaatcataaatcagcacatggaggttagagattggtttggcctaaaaagataggatatcttgaagcaggggcttaccggtcattgggggattcaaagattctccggttaaggaagcaaagctttgtctaaaaacttggggtcagcagaaaggaatgttgaggtctggcctctgcatgtgactcttcaagtcccctcaggaagaaatttagaacaaagaatggcactgagtcctcacttctcccttacctgaggtctatgtgccagtgaacgacattttccatttggtggggggtgtgagtttctgaaaaacaactcagggacatatgtgaagatgttatctttagttcttcttttttagagacaaggtctccctatgttgcccaggctggtcttgaactcttgagctcaagggatcctcctgccttagcctcccaaagtgttaggattacaggcatgagccaccatgcccgacctgtctttagtttctatagggaaccgaacatcttgtggctctaacttcctttgctattgttttcagcaattattaccctcttgcttatcaggttgcttatttacatctcagggctggctaggtgtttggaatttcccttgaaggaactccagattttcctttatttccatgcttggggcagggtggcagtcccctaagaagagtctctgctctgtctcacacccaggaggacattcagaaatgtccaaatctcctcttaagtctagaccagcgttgtccaatagaaatgtaactcaagccatatatagaattttaaatgttttagtagccacgttaagaaggcaaaaagaaacaggtgaaattaatttcaatgttggattttatttaacccaccatacccagaatatcatttcaacatgtaatcgatataaaaactattaataaaataccttatattttttgtactcattttgaaatctagtgtgtatatcatacttggagcacatctcaatccagatcagcacatttcaagtgctcaatagccacatgtgtctagtggctgctctattggaaagcacagctccagaccaagagagcaagatcaagcctgtcctttcacccacccaagccacccttcagctcacttcctgtctgagaacacccttctttcccaggtgactgctctgcagaatggcttccagcttcttggaagacatgcctaccacccatacacatgggtgtgccttactttacacatctcaccagaaaaaccacatcagaatgcaacaccataacctcttcattcattccataaggtaatacacacaacaggtaattaacatttccaagcacttccaggcttgtcatttgaggcaggcaactatcacccttctcttttccccacatgcttttgtagagcttcatccactgtaatcttgcctgtattcagtcctctctgataattcatttattcattgaatttgttgagtgtctactgtgtgttatggagttaaaaatacaataacgagcaggaaggatgtaatccctgccctggggaacctcaaactcaagttggttgggaggaagagtgagcagaattttataacatagagtaatgggggaaataaatcctacgggttctggaacctcataggaaggtaactaacctaacccaggaggagtgtgtgtgtgcacttgcacatagatatgtgtttgtgcacatgcatgcatgtgtgtgtataaggaggcactcagagaagccacatctaaagtgagacctgagtggaagttggggtgtgggttgtgaggtgtgggatgggaaaagagagagaattccaggtgaggatagagtgtgcacatgttccagaagggcaaagatcaagtagggggcctgccaatcactccatctagctggagtccaggaagaggaaatctgtggcttaggggagacataggggtgaaaagcgataatcacagtcaatagtttaggcttcatttaaattctgtaataaaggttctgggaacgcagctctggttctgatttctcacctgcattcatattctgcacttccagctgtgtatggagcatctccatgtttcactccgacacatgttcaaaatcactcagcaccttcactccactactaaatattccaaactggttatctgtcctaatctctctgtctctaataataagataagcatagttccagtctcctacctagactaaaacatctttcgtctctctcatatcttcattccatgtagccaagttgtcactaaatcttgctaattttttgactgagtatctgaaggcttttggttcaggcactttctggcttccctgaagataattcatcattcagttttctataatagctttaaattttcaccaggcctatctaaattccaagcgctataatttgtactcctttgagatatcagtttggaacaaaccagcagcttaaaaaatcgcatcagattatacagtagaaaaataatttcagcagtccagaaaagccccaagtaatttttattggaaaaaaattcttaatgttgtatttatgcttagattctgccattttcttatgtacaataaagttcatccgccttcctcctggagtcataaagttttattatctgcatagagaaaccataaacaggtatttttatttgtctaattgtgtccctccttttatatacaagcccttccccggatacattacctgcacattcactcaccctaaaaaaaagttcaacattgtttgaacttgtccttgattactgaatatcttacttcatattggtttggcaattcattataaccacaccctgaaaactggacatggaaaatttaaaacacaagaaccagattgcattgtatgtctcaggaataaatgagaagagaaatgataatttcccccagttgtattttgtcatattttaaacaaaatgtccactggctggaaattccatttcaagcagtaagtatttattgaaatttactgacgatgtccagcatgcaattacatgttagaagtatggtgaccatgtttcctaaaattaaaaatcaggacacatgatgtgacagtaaacagagcacctgaaaacactcctgtcccagaaaatgtgagttatgtaattgcaatcgctacaggaaatgcaagagaaacattgttcctcaagcttacaacttattggaaacataagcataacacacattcattgactttgccactgaatgaagagtaagtgaacactagcaaaggaggcactttgttagctggcaggattacagcaatgagaaaatagtcaccttaaatactttctcaaacaaggtaggctcttgtgatggccaattttatgtgtcagcttgtctaggctatggtgcccagttgtttgtcaaataccagcctagacattgctgtgaaggtatttatttaatttttttagaatggattaacatttcaatcagtagactttgagtgaagcaaattaccctccataatgtgggtaggccatatcccatcagttgaaggccttaagagcaaagattgaggtttcccccagcaggagggcattctgcctcattctgccttcaaacccaagactgcaacatcagctctggccagaatttcagcttgccctgcaaattttggacttaacaggcccacagtcacatgatccaattccctaaaatcaccctccttctctctctctctctctctgtgtgtgtgtgtgtgtacacacatcctattggttctgtttctttggataattctaatatggttcttataagaattgttacttatttttaatgcctgatataattgatgcattttaaaacataattatatctttttttccataaatggtgacatcccttttaacaatacatcttctagcagtgttgttgttgttttttttgttttgttttgtttgagacagagtctcactctgtcgcccaggctggagtgcaatgacgcaatctcagctcactgcaacctccacctcctgggctcaagagattctcctgtctcagcctcccgagtagctgggattacagacacgtgccattgtacctggctaatttttgtatttttagtagagacggggtttcaccatgttgcccaggctggtctcaatctcctgatctcagatgatccatctgcctcagcctcccaaagtgctgggattacaggtgtgagccactgtgtccggcctagcaatgtttttaaacataggggcctttcactttcaaggcccaccttgctgctgaggagaaaatttagaagccaaagtggaattctcagatgaaacaaaattgtctgaattttaaatggaatgagaaatgagggaatgcagggagcctgaggaaagctaacaaggtctcaaaagagggagacaacagggacaaaggcacagagaaggcaactttgaccttccgattacaaaatttggggaaaacgaactgcatggataatagggcctgtgcctgtgagtatgtttccagcagaaagaaactatagaaagaaaagaggacagcagagcaaaattggtcaaagcaattgaggataataatcaaaattatttggaggtgaaaaaggagcaaagaatgtagtttaagaggcagaattgtgagttcagcactaaattaaagtttgggtgctttcaagcttctataaacgattccagtgaaaaatggtacaggttgatctgttccacaaagaaaggtgaatgctagagaattctctcgtagcaagagaattctggatggaatactaagaacatagcaggcccacttctctgaactagcaataaaaaacccttggaagggggaaataggaataattagacataattaggttgtcagctcgtatatcattatgtcttgcctctcagggatgtttcacagattaattagttaatgtttgtaaaataagctccaagtgccatgtatcattggcatagaatttgattttcagtgtgatgaatgtaattaagtcatgttgctttcatacggccttcactgcaggatgatgcctgctccggaatgttctgggggcatgggtgcatgggcttgtgcactgacatttcaagaacagctcttgatggtaggcattttgcatcatgtgtgttacacttctcaggctggatgacatatttgaagtgtcagattagaattgtgttctctattgatgaataaaggttacgtttgtacattacatccatcttgacagtatagtaactaaaactgaacattttaaaatcaagatcagcaggggagaaaacactgagggtcctttttgggccctgggtcattcttgcctactatatgacatatgcgttaaatagtctttagttaagaaattcatttttttttaacccagagaggcttcaaaaaaatccccaatccatacctgttagtaagattttcttaaacagtacaattgattgttgacttacaggttcaactatgtagttcatatttttagatttggtgattttttagaaaggaatcaaaccaaggtcaaggaaatgattttcaaacattttggtctcaggacccatgaatactctttaaaaattattgaggactccaaagagcttttgtttacatgggttatattaatagctaatgtttattgtactagaaattaaagttaagaaagattttaagaatttatttctttattaaaataagccctttatataataatataaataagatactttcaatgaaaatattagtgagaagagtggcatcgtttcacatttttataagttgctttaatgtctggcttaatagaaaacagctgtggttccatagctgcttctgcacccagtctgagatgatacattgttttggttgaagtagatgaagaaagttgggcctcacacaaacctgtaactggaaaagagaagagtactttaacaccctttttagataattgtggatatttcttttagatttgacatcaacactcaacaagtgatagtttcttcaaggatgatctcctaaatctggtagaattggtagattctgaaaccgtatcaatgactttttgtccttcattgcattaaaatccgttggtctctcatgtattggcattatgcataggtcatttggaaaacactgattccctgagtaatgcaggtcttcttgatgttgacacatttcattatatggtatcaaataatcactatgataatatcaccacggattttatcataaatcctttaaatattggtatgctgtcaacttttttagaagttctcatttttgcttgaaagctggaattttattattggcaataagtactttcagttgttttgcttgaagtgatagtctcattttgttcattttagggaaaatgtctgccaaatcctcacatctgaattaccatagtttgttttcgagtaaaaatggaattccattaaaaagcaactagttcagctcacaactcaaataatcacacacatgattttacttgagtcaaccattgtaatcggtatgcatcaaagtatttatgagaactcatttcctcacacagaatattaaaacggtatgtgcacaagcgccaacatttaatacaatgaatacttttcacagctttatcaaggtcattgttaaatgaatcagtgctttaagaaaaatctgtgaacacgtggcagtgacaattcacagactgccagtacaatttggtgccactgcctcaggaatgatgagttctacccattttacccagcagttttactcattttgccattgctttaccaatgctagtgtcagcacagtgaaaaagcaaataatagccccaccttataatgaaaatagtattgaacctgttgactcccttgaaaaggtcttagggatgtccaaggatccatggacactttgagaatcactggcataagaaatgccctgaaggtagggcagcggagagaggcagggtgatatggtttggctgtgtccccactcaaactcatcttgaattgtaatccccgtaattcctataatccctaccatcttgaccatctggtcaagggaaagaccagatggaggtaattgaatcatgtgggcagtttcctccatgctgctcttgtgatagtgagttctcatgagatctgatggttttgtatgtgtggtagttcttcctgcattctttttccttcctgctgtcttgtgcagaaggtgccttgcttcccctttgccttccaccgtgattgtaagtttcctgaggtctcctcagtcatgctgaactgtgagtctttcctttttctttccttcataaattacccagtctcaggcagttccttatagcagtgtgaaaacggactaatacacagggtatccttttaaagaagtgatttcagctacaggtagaacaacgtaagacagtctaatttgatgaaatgtttggctttttaattttaagcagcaggaagcctgttatactgccttaaatcagtttctcatttggtttgtaatacacaagaagaaacatttcttacattaaggcagtatacacatacagatatatttactgaaataaaagtttcatgaaataatacccttaaaatttgtaatacatgctaacatttaaaaaatttttattctatttcatttaacaaaaatttgtcatgacccactaaattgatttcataattcaccaatgggttggaaaccacagatggtaaaaaaaaaaaaaaaaaaaaagaggaaaaaagaaaaaaaaagaaaaaaagaaaaaaaacttgctctaaataaagatgctttcattttgtaatgtataaaccatgggtgtccaatcttttggcttccctgagacacattaagaattgtcttgggccacacaaaaaatacactagcactaatgatagccaatgagcttaaaaaaaatctcgtaatgttttaagaaagtttaccaatttgtgaggtgctgcattcaaagccatcctgggctgcatgtggcccgcaggccacggtttgataagcttactataaacctcctaagggctgattacctttggtttaaaaccagaggtaaccaggactctttaacagttgcccattccgccatttcttgattcattttcaaatgattttagggtgtgggtcaaatgagaaatacttagtttcaagaatgtaatgtgtatattattatgtgaaatacatatttgattttattttctctagaaagtctacatgtttacccggggtttttaaaacctgacactttttcttcagcattgttggataaatatacacaatcaacccttactaaggaggctgtgttgaggctggtaccatagttattattactctcatttaaaaacaaacaaaacaaaacaaaacaaacaaacaaacaaacaaaaaccaccttagtactttttcaggatctaggtttatatcctatttgtttttttcttttaattttttttaatccccctctcccaggccccagtgtgtgttgttcccctccctgtgtccgtgtggtctcattgttcacctcacactcataaatgagaacatgcagtgtttggttttctgttcctgtgttagtttgctgaggataatggcctccatctccatccatgagttctatttgatactgccctaatttcctactctgccaatcctttgagaatcattactcagatccaactaattgtaaaaatcagaataaaatgagtgtcaattttggtttcctgctttaaagttaagtattactttttgttggtgataatattagcagagaggcagtaagaaaatagaatatctgagataaatgcatgtcttcttttccctcttgagtgtttgatcactccctgcttctcttagttggctctcaggatctctgtctctctccccttctctctctccacaccccccatctctcctactatttttttttcaatctctttttaaaaaaagccttgatccttgcacccccttgtattagttcgttttcacactgctgataaagacatatccgagactgggcaatttacaaaagaagaagtgtaatggaattacagttccatgtggctggggaggcctcacaatcatggcagaaggtgaaaggcacgtctcacatggtggcagacaagagatgagcttgtacagggaaacttccctgttataaaaccatcagatctcgtgagccttattcactatcacaagaatagcatgggaaagctccacccccatgagtcaattacctcccaccaggtccctcccgcaacacataggaattgtgggagctacaattcaagatgagatttgggtggggacacagccaaaccatatcatttcactgcggcccctcccaagtctcatatcctcacatttcaaaaccaatcatgccttcccaacagtcccccaaagtcttaactcatttcagcattaactcaaaagtacacagtctaaagtctcatctgggtcaaggtaagtcccttctgcctatgaacctgtaaaatcaaaagcaagttagttacttcctagatacaatgggtgtacaggcattgggtaaatatagccattccgaatggcagaaattggccacaacaaaggggctacaggccccatgcaagtccaaaatccagcagggcagtcaaatcttaaagtgccaaatctcatttgactccatgtctcacatgcaggtcatgctgatgcaaaaggtgggttcccatggtcttgggcagctccacccctgtggcttttcagggtacagcctccctcccagctgctttcatgggctagcattgagtgtctatggcttttccaggtgcacagtacaagctgtcagtggatctaccattctggggtctagaggacggtggccttcttctcacagctccactacgtggtccaccagtgaggactctgtatcagggctccgatcccatatttcccttcttcactgccctagcagaggttctccatgagggccccacccctgtagcaaacttctgcctgggcatccaagcatttccatacatcctctgaaatctaggtggaggttcccaaacctcagttcttgacttctgtgcactcacaggctcaacaccacatggaagctgccaaggcttggggcttctgccctctgaagctacagcccaagctctatgttggccccttttagccatggctggagcggctgggatgcaggtcaccaagtccctaggttgcaaatagcacaaggaccctgggcccagatcatgaaaccatttttcccttctaggcctccaggcctgtgatgggaggggctgccgtgaagacctctgacatgccctatagacatttccccactgtcttggggattaacatttggctccttgttactgtgcaaatttcagcagccagcttgaatttctcctcagaaaatgggatttccttttctattgcattatcaagctgcaaattttttgaacttttatgttctgcttcccttataaaactgaatgcctttaacagcacccaagtcacctcttgaatgctttgctgcttagaaatttcttctgccagataccctaaatcacctctatcaagttcaaagtttcacaaatccctagggcaggggcaaaatgccaccagtctctttgctaaaacatagcaagagtcacctttgctccagttcccaacaagttcctcatttctatctaagactacctcagcctggactgtattgtcccgtattgctatcagcattttgggtaaagccattcaacaattctctaggaagttccaaactttcccacattttcctatcttctgagccctccaaactgttccaacctctctgcctgttacccagttccaaagtcacttccacgtttttgggtatcttttcagtagcaccccactcccagtaccaacttactgtattattcctttttcatgctgctgataaagacatactcaagactgggcaatttacaaaagaaagagaggtttaatagacttacagttccatgtggcttgagaggtctcacaatcatggcagaaggtgaaaggatgtctcacgtggtggcagtcaagagaagagtttgtgcaggaaaacttccctttaaaaaaccatcagatctcatgagacttattcactattatgagaatgtcatgggaaagccctgcccccatgattcagtgatctcccactgggtccctcccataacacgtaggaattgtgggaactacaattcaagatgagatttgggtgaggacacatccaaaccacatcacccctgtgtttaaggtcaaagtacctgcctggtcctgcctcctttgctttggcctcacttactgccctggcttcaagagatgtgtaggaaggaatggcagagggaggcagttgaaagtgagatgttcagaaaagagctgaagagtccctaattaggaagaagccagtgggaatggaaaagaggggacagatccataagaattagctagtgattggattggcgatgcagaagttaaaaaagatgactgagaatgtattgtggctgaaattgataagctaggaagaggaggtcatgcaggaaaaatgatgagttcattttctaaaacatattggagatattcaccaggcaccagaatatattgtagtggaagctgagagcatgcaggacatgagttaaactcttggatataaatgaagccactgatttagagcacatgaaataaaaaggtaactaaggctacatttgggagacttcaaagcccaaagagcagtaagaggacgaggagcccatgaaggagacagaaggagaaatccaaatagcaggagaaccacttagaaaaatataacttgcagaggcaaagtaatttggtagcacgtgaaatattatacgaagttatagtcctttagggaaaggacaactctcatcttctgagcaaagagtaacagacaacagtgttcagggatgcatgatgtgaaaagaaacatcatagaatttggggccagcagtcatggattttcatttcctcataagtgcttactagctatatgactttaggcaagccacaaaatacacatatgaaaccactagagcacactggaagtctaatctggtgaaatatactgcaagaattatatcaggtcagaaagagcataagtgtctgttttgaggaaattagagaacactatcaagtggatagaactcaagtagggtatagaaggattaataggatttaggcaggtacgatagtggagggtgcatacatgatttaaaaaccgatgattcctcatctggagaaaaaagaatcaaagacataaattcccctgaaaaagaatctttgttccctttttccttgtttttgaactgttttcttgcttatttgagatgttgagatatttatttgagatgttgatatactatggtatatatatatggtatgatgtttgatgtaagaagaaaaagaaggaacaaagcatacttttatgtaaaaagtcttcctgtaggatgaataggttgttctttattttactttattcactttcattttagaaatgtactctgaaagttttcaacagatgttccttgggttattcttaaggaagttagtagcactttatgtagaaagttgagcaaccatgttaaaattccctcactttataagtaggagatattgaataaaaatgagcagttcattatttaatttagagaacaaaagtgaaagtcatacatggcgatttgggaggtatatattagatgtgatatgaatgtgtatcttcctggattgcaataggagagaagtacagggattgatttcaaaatgaagcgagacactgagggaatacaatctggaggaatataactgttttagagtatcgtgactttaaagataaaatatcagtttggtagtaaaccaacattcttgggtcatgatgctggttcttttgggaaaaaaattaaatcaagcaaacataaaggcattttattccactcttttgggaaaatacagttacaagttttacctccaagaatcagttccagaatacaatgggctttattgactgtatattggaatgggatcaatagctttggtgtgtgacagagactcattcattgccgagaatttttttgttagccattatcagtggcttcagaaatggtcctggtgttgttcactctgcttctaatgaaaccggtgagatcaccagtactcacattagtgaggacaagctgaggattagcagcttttcaaaataaaaaccagaaagtactaaatgtcttcactgggaggtggggctctgggtcttaagaggatttagacacatacaaggatcattactatgttattaagttattaagtatgcattcataagttagtttgtatttgccaaatgcaaatataaaaatcatttcttaattatacaggcattaaagtcttgcatcattaaccacatatttaaaaccactttgtatcacttacaaaaacaatttaaaatatcagattattgaatttcctctgttctagtggccaaatgccttccagccaagattaacctgtttattgtcctgtaattaataaattaaaaaatgttatttttcccatttatcaaaatttgaagttcagataaatgaggcagtttatatgaagtacatatatattcatcagtccactgttaaaattcaagaattgagctccgatttttttttaacctaggctgcatttgtaccgtatgccaggcaggcagcatattgctaagagaaaagcaggacaataataaaaaattattagctttgagttgaatcacaaaggagcaacaaatggaaacttatccactagccaagaagggcggtagttcactcttccatccatcaccaccagctggcagatgggctcgggactaatgtaagtctccttagatggcaagttctctgcttatgcagcagtctgtgtccctgccatacaggaagaggaggacagagagaggaccgaagcttacagttccacgtagcagctcatctcactgttaaggaaactgtggggttagccaacaaaactggaattcaaatttggaaccagacctcacctgatatattttaattgattgccatgtgattgtccatctgtttataatttgagtgtcttttctttgtatgagaaatgcttttgtacagggcgggacccatgctcctctcaatttctatatggaaaaaaatattttctattttttcattgctttgctgagtagctttcaacaagcttttggaaaaagtctcattccagatttataaagtatcaactgatgtgatgctcaaacaatgggaggattttatgggctgtaaagctcttattattaagtaattttttggggttatggtaattttaataatagtagtagtaaactattttacaggttggaaggctaataaatcctttaaaatcaattgagattatttaaattcaatttacacattaaaatccaaaatattatttggctattgctatagttttatgatttatttaaatatcaccatttagactacaaaaattaatgctaggtagaataatagagtaaaattactgggctctgaaatttgtataaatgcaaaaattgctttattttttccatttaaaatatgctcatcttcactggtccagctttgattctcttgcctaaacctgccttatatgagtcccttatcaaaatgttggcagctaaattaagacttcagagctgcatttcttgaggaaaaagaacagaggttctcaaattatgttccatcagaatcatctggggagccccagccccagccccaattcaaatccgtgacatcagaatctggggattgagtttttttttttttctcacaagttacccaggtaattctgatgcacatcaacatttgaaaacaagtaactagaccaacccaagagccaaacactctcacagcactgcttatttttgtaaataacatttgactggaatatcctcacccatcatttctgaattgtctatggctgccttcatgctgcaatggcagagtcaatcgttgggacaaagatcatatgaccacaaacctgagactatttactgtcctaccctttatggaaaagtttgctggccccagaactagatgaataatataaatacattgttccagacccagttgtttcaattcattcattcattcattggcctagacaaataggaactaaaaaaacttagaaacacttatggggttaaaaaggacagtagacactgcctttaaattttctttaaacctttcaattgcttcaaacgaggaaaaaaaactaagctggatatgttttcttttttaaaaaaaaataactgcattcagtggaggttttgaacatttaatggttttccaacttgttgcagcaaaatgattcatcactaaactaagctctgtagtatctgtaatattgtaaatttagtagctcagtcattaaagtaaaattcaaatataagaaaaagtaaatatattcagaaacatactcacttcaaaaggttaggataatatttaaaagattataggggcttggaagtgtgtttgaattcagcaaagcagcaaaacggggagggggctaatgatttttaaggctgcctagccaaagacagcacatcataaaacaaggatgctttctggtgatacagtacaagaatgctctgtacacagtatgaggcatctttaaatgtgaataaattggaagaagttccaggaacaatagatatgcttaagtgaatgggaggactgagctgtagcaaggcctttgatttacatagcatgattacttcaaggcgtgcacagctcttcttcagggctgggatggattttcttcccagcgtctacagaagatgttgaattgacatcacaagcaattgtcagcagaaaagagagactgattgccaggctacaggagggagttggagagaggaattcggctccttacaccttgttcatcatgtcattcactccctccttcaaaaatcttcagcgacttcttattacttaaaggattaaagtcaaacccagactggcatttcaggcattctttaatctgtgtcttatgctggtatcacaaagcattttcatgcctattatctcatctgatctttacagtacggctcatgcaagtcagggaaggcattagtgttcccattttatagacacataagctcagttacagccaatgaaacagactggttaaaggtcatgcagcagcaagccactgagtcagggctggaacttgtgtctcctgcaccatacgacatgtccctgagtctttttcctctaagttagatttgttctcaaaatatgtctccccttctctacatggaatgccacccttctagttcaattgctatctctaccagcaaacctttcctgaactccagtcttcagtgtgcgtcttctcctctgaactcttttttattgaccccactacttttcctcagagtcctatccactttgcagcatctcctgtctgctggatatttgtattgcacagtgagactcttgaattgcttttgaactttgcatgtgtgtatgttccatgtctccaacagaaatgcacgctctttgagggagtacctaagtactctatatgtcttttctcctttgataccttgcatagtgcataaagaaagcagggcctcaataatcatttgttggacaaacaaatgatttcattctcatgcaatctctgaatatgattaagagaaatgagatgaaactgaaaaagagagaccagttgaataccacaaatgtgtttttaatagcaaattcttttctattgaatcgaagtattccaagggcaacaactgatgctccatgtttagctgaagcccagaatcatgaaggctgactgctcttaaactgggcataacataaacccacccacaagaaattaagacttggaatatacattgacaagagaatccttttgtaccttttcattctcaggccagcaagtcccaggcatttggcctaatggggagaaagagaaagacagtgttttcctctcaaaacatgggtcttgccatatcctctcttcctaaggctagcactgctctatacttccctggcctgtgcccaaaggtgcatctgcgacaaggcaaaccctgccttggagagtctccaagatcttctcatttcttcagctgagggattaagaactaaacacagttgctcaggtgggtggctcatgcctgtaatcccagcactttgggaggctgaggcgggtgtatcacctgaggtcaagagtttgagatcagcctggacaagctggtgaagcactgtctctactaaaaatgcaaaaaattagccaggcttggtagtgggcacctgtaatcccagctacttgggaggcgaaggcagaagaatcgcttgaacccgtgaggcagaggttgcagtgagccgagatcacgccattgcactccagcctgggcaacaagaacaaaactacaactcaaaaaaaaaaaaaaaagaaaagaaaaaaaatggactaaacatagttgcctttggaaggtctggtcaatgggaaataaattcagggatgcatcacctcacaggttgggtgcctcttgcagtgcaggtttgactaagcccacctgatgccctctttttgcaccctcactcagccaatgtttccccttccctccccaccacatctctgtgttgtgatttcctttccagttgccctgaccctcgaggattagggcatgaaatgattcaggcctgatctcgcctcccatgctggccacacctgtaatcagagttctgagttcagagccccaggcagcttaggcagggctgcgtggtctatacctttattctatgtttgtggatgagtttattgaccaacttaaaactaaatgctaggttatacctgtttacattgatgacttcctctcaatttgctaggtccttccatcacagaaactgattatattaatctgagtgctacctgggaagtcgaaaacttatgtggtttttattactcctgcaagagcctctcaattatattccacacacatatttcttcacttaagagtcaaacagagctatgtaaagtgagcagcatgtttacagtagatccctatggcttgctatcaaattagtggcaaatcagtattagagtaaacaggggtcaaagatcaaacccacaatttcacataaaattcaaaacacgaaacacaaaacacaaaagagaaggctcgtgtcatgagaccatcaactactcttaaaaaataatcaaaaccaggaaaagatgagaggaagcaaaatttaaacatgattttagtccagaatttgatgcaaaagccagaccttacagagatctatttaaaactatgacaactcactacatgtcactcatcttaaatggaaacacacatcaaaaggtggcaagaaccaggatttagcaactcccgcattctattcatggacttgacactgactttggacaagtaaaaaaatctgtcttcatttttcactctgaaaagcagggtggaaactattgttttacttctcttgatggacaactctggagtcatgctaataagaaggcagtggtaattctctcctagatttgattagatgtatttttgaaaagtcaaatgatttagtagcatgaaattgtacacaccacaccccatttttattgtaggcagctctccactcttggcttttaagcaggaaactagaagaatcacatttattccatgttaaagtgttccttgaaaacaaaacaaattctttaaaaatcagaaaaattgattattgtttagaccatgttattaaaacaggagccctaagttagtcaatagtttgtagctattgttattaatctaggattaattactcttgagttaaaatagaactttttaccgaatgcttacatgaatggactaggctagctgttaaatagtataaggggaaaatgaaagtcttttcaaatagaaattagaaaaactccaaaagatttacaaatatttaaaaacaactcagtaaatgattttaattataatactgcttattaatttgtaagatttgcttaatcaatgccaccagatgtcagtatatcctacatgattactattgagttctcaaaaacatccagagttttcattccagttaataaaaatgatgttgtagccaaataattaaggctctctaggggatgataaatcccattcctcagcactgttatattatgatagaggccccccttcagtgagatgcaaactcccaagtccccaataaatctcagcattgaggctttgaaagcaagaatgtcgtattctgaaaaagatgcttggtggtggagctaaagcatgttgaggaacactgacgtgagtagagcttcagcaggtcaagtctaagaccacgaattctgtgacctgctgatcctattggccttgtttttccattatggaaatatcttattgggtttggcctttcacccaagggacttttcagctagataagtggaatttttattaacgaagataacttttactggatatgtgctaggatgtatacctactgaaacaataagaagatgagacaaaaaaagtttaatgtgtttgaagtataaaagtctggtgtgtgccactttttgacaataggaaggatttaaacttattagcactgagttctcaagccttctagaattttctctttggttaacaaagtgatgtagtgctcttaaaaattaagggtcttagtaaacttggaaacattttgcattttaagttagttttatgcaacaactgatccattcgttgaaaggataaatccgggagctttctaagaagtagtaaggacaagatctaaaatgttatttaatagtatgcctgtaattgtgaagtatatgtgcattttgagaactataaactctataaatcttcaaagttcctggcactttgctagttttcaggaaaaataaattttgcataaacaagagccatgttggaacttcacattctacagtctcactgtggagattatcctgggcatggccctggggacagcattgccaggcagctaggcttcctgctgcataatgaagaatgcacattttatcctcggaataaaagaatcctcttttatcctagaagttgatatttctgtgagctttacccttgaagagaaatcctttgaaatattaatcttcagtagaagaaaaattgttatagtcttggtccttgatgaaaagagaaagaaaagtactgcaaaatttcttggactctactaaaacatttgtacacctgtaattgtgtctgtgaaaaggtaacttggattttttttaaagtttatctaattttaaggcatttgtgaaattcactacaaacagagctctctctctccataaatgcacatgcacacatattgtttctttggtacacagagatcattgaaccaaataattaaggattctctatggaataatgccaaataagaaattttaatttggtaacatatgtgttttatgacacagttccccaaagttactgtatttgaatatctgctctcacgtataatcatgaagccttagaaatcagaaaatttgacctagtacctgaaagcaagtgctacaaaaatcactcttaaacacatcttacttgtcctcaaacctttccctatcaaaatgcatttcacaaaatacagggactgtcacccactcctcaggaccctgggcatttgcactacttaatttttaatcgccatgattttgtgaactaatttattttactcactaaagctggtttctaggtaataactaatcttcccaagaggctgttggacaaatagttggtaggtataattgatttttcaaagctggaaaaagaaaacaggaggaagtgaaaggcatttcacatacatcatctcttttatccttcataaaatgtatgaggtaagattaccctctccatttgactgatgaggaaactggctcagagagggtaattaacctgcccaagatcactctctatttaagtaggagagccaggatttaaactcagatctgtctgactccaaaaaccattctctgtccagcccaagatgtttccatttaaattacttatccacaattacatgatgagggataatagaattgacacaaaactcactgccagtgcactggagtacgtttgaatggaatcctcacaataaagtccaacagcacaactcctcctcaccaaccaacaacatcctacatttttttctctcttttattgccagtctgatttactctacagaatcaatatcttaactaaatcatagatttgctttctcttgaatcctgtaagccaccctgagaggctcagtccataaatcactgaggaaacaaaatgtaaagaaattggaacaggccagatgcaatggctcaccctgtaatcccagtgctttgggaggcttaggcaggtggattacttgaggccaggagttcaagatcagcctgggcaacatggtgagacctgtctctacaaaaaatgcaaaaattagctgggcatggtgacgcatgcacttgtagtcctagctacttctttgggaggctagggcaggaggatttcttgagtccaggagttcgaggttgcagtgagctgtgattgtgccactgcactccaacttaaatgacagagcaagaccctgtctcaaacagacaaacaaaaccacagcaagaaatgccattcaaatgtggttttagatgcactgtggatatggtcagcaggcttctgtgtgctcatgaatcaatctgaatggggcatgaagagggaatatgaactcagaaacttcacgttggttgtgggtactccaaatgtcttgttctcactcatctttcctctatctcatttaaattcaaaaccatcatttccaaaacagaagagaaagagaaagcggggggcggagggaacaagagtgcatatacccagattatctatctatctacctatctatctatctatcatctgtctatctatttattattgagacagggtctcactgtgttgcccaggctggtcttgaactactgggctcaagggatcctcctgccttggccttccaaagtgctgggattacaggcgtgagccaccgcacctggccccagataatcttagtatcaagttatgtgaggttgatattgcattgacaagtctagggtcaaaacattgacatatttaaaaactcatcctatttattcagcgtggatctcaatagatttaggtggtaccaagttcttgtacagaccacaatacagaggaagcaatgggaaatcaacctctttcctaaccacatagctgtttgcttttaactggatgattgaggcagcttctaacttttgtgtccaaatgatgatttccagtgttttggaaaagtaataagatccttcctggggccagtttggagccagctctcaaaatcacagactattgggctaaaaaggctcctaaggacaccagcacttgctgagtaaacacagcctaatggtcaccattttgttctcgagtgtacagagaacatgagtaaccagggagcgtagaaaggaaaataatttcacagggttgcacaagtattacttattgctttgttacccacaggggaagttcatggagtttaagacaccatcttgatcagggtgttcactctgcaatcggtcctgtggggggttttcaacactgtgcccagctatagccttcaaaattgtcttgtaaaaattcctgctgttctgacacaatgcaagagaaggtctcattcttgtgtgtttgcatattttgtgcaggagatgagagcttaccctggctcgtctctctaacacggtctttggtgaggaatatgccaaaacctgggtcacagtccttgcatcactctggaaggtgcagacttccacagcatggtggcaattcctaaggccagctgcagagctgctgtcagaggctctccctgtgtggagccaaagatttcaaatactgcacattttctgctttgtttgatttttagggtaaacacccttctgtgtgtaggtaaaggaaaaaaaaaatcagccaattttatgtctcactgacctagaaagggcaagctctgaaactttcatataacaaaaagaatctagtctggaatgaagtaactcacttttgcaaatatttgtactgacaatacagtctgtgcatacaattttttttaggatactcaaatataggaatttgagatgtttgaaacctaacaaataattctcaccatatgcccatttttcttaatcttatcataatatttcagaataaattcgccagctttcttacatccaactgccctgatataatgaaaagagagcccttctctctcttttatttttggggagtgtttttaaatcaagatttatattcagcatgacattgctgacgtgattcactcctcttggctctccagggtcatagcccaacttcataacctcagcactaataacaaaataaaaaaactaatagcaatacttattatttattgattaatgtgtatggaccatcacttctgagaattttatatacaccatgtaatttaattctcatgacaattagtaaacaaataaagctaacaccaaatgtttactatgtgtgaaggttaatttaatgcatcaacttgactgggccacaggatgctcagactggggcacagttaaacatcattccagggtgtatctatctagggagtatttgcggaaagatgaacatttgaattggtaaagcagatggccctccttaatgtgggtgggtcacatctcatctgttgagggactgaatagaacaaaaaggaggaagatcaaatatgctcttggccgggctgcttgagctgggacatagcgctcttggttctcaggccttcaggtctggactggaaactacaccacctgccctccagctttcaggccttcgaatgacaccaccaactttcccaggtctccagtgtgcagatggtccctcttgagagttttcagcctccatagagccaaaaccatatatagacatagcctgttggttctgtttctccagagaactctgattaatagactatgtatcagacatgatcctaatcattttacatattaactcatgaaccttcataatcctctttagtcttataaaatagatttttacccattttacccattttaaagactactatgtccacattacagttgaggtagagatatcatctgataggctgagagagtcaacaacttggctcaagttttgcacctagactgttacattaaccaaaatggcaactgtttcttctgttgcgaatctacccttttgggatatcagaattataatcttcttttccttcaagccttcaatggcttactgttgcctctggagtgaattccaaacttcttagtgtagcattagaggtcccaacatttggctccagcctcggttcccatccatttctgctctctactctgggctatgaccaccttacgtgggatctctcagctccactgcattctttggtgcttatgggcatgtgcaggtgctacttgggtcatttctctccatccctgcctactgttaccacccattcctaggccctcatcatttctcacctgaattactgccgccacctttgaactggtcttccttctcccctgcaaaccatcctctactcagtagccagaatgatctttctaaaatgcaagcctgaacatggcatgtccatgcttaaggcttctaataatttccccttgccataagaataaagtccagattccttcaaacggccctcatgacctcgtcccagcttacctctccagcctcatctctcactatcctcctaaatgggcctcttcattcttcagcctttgcatgaaaaggcccttttgcctagaatattctgctttagtctcacatggacaatgcctactcaacctttagttctcagctgggatgtcatctcccttaggacaccatccttgactcacccctacaaatgttttccaggctggaagcatgcggggccataaagagggccacacacatcatgccagctactcattgttgctcttctcccactgtgtggtcatggcctggctcttgccagcttctaacactggactctgcattccctaaatggcaggactgttattcactattgttgccccaatacctgccacaccatagcaaactcaataaatgtccagtaaagaaagtgaccaaatgaacaaatgaatgagtatctggaatgcctgctctgtcttcacttcctgaagaaatttctgctttgcttcaaaagttggctccaacctcattctgcctctaaagctgtccttgtcccgtcccctctgtggaattaacagtgcccttctcgtctggaaaatgtgctattagatagatagatagatagatagatagatagatagatagatagatagtatatttagcaggattacaaatatggctctacaaaatagtggcaaggattctatgtttacccacttcaagcttagtctttggtgcagggcctggccctagtaggctgtcaataaacatttgtggaattgaatactgtgtttcacatcacctgtccattcacatcagctgaggcttttcattaggattacatcatcacaaatggaagaaactgaaggatgcaaagagaaaaaattaggaaagatgtagcattgcgatgaaacaatgtacgatatccagaaagacacccagccttctgctcctggggctgtctgcttcctccctaggggaacgtgcggcacattgtctcaaagcatagtctttctcccctatcttgtctccactgactccttcacaatgggtctgcagcccagcatatgcttagctatttagacagcaaataatagtgggttttcccccaccatgttaacattcagtgctaagcagtaagtatatgcaagtaggtggcaagccttgagtggctaaaccttggtgtcatttgatacatcaatctggggctcaaccatcccaaggagttttgtcctcagaagaagccaagtcaccccttcaccctgactctgtttagtccagtccacatctttggttcagctggaaatcccctctccttaggcactgaaatcccagtgtggacactatcccactccgcagtccacctttcactcatttatcacattattgtctgctttgacaaattcccctctgcagatgcattttctaattgctgtttctgagagttattcaatccccattaattaatccggttttccctcacaacagtttctgtaaataacttctttctcctcttcatccctgtgctcaatggttcacccctacaggtcttctgcggatggtcccctatgtttctcagtctcccctatggttcacttcaataagcatttacagagagtccactgtgttttaggcactggtgataaataaaaatgagtaacaaatagtgcctatcctcaaaggaggtatcctagacacacagaagcagatagaacacagagcgatgaaaagatcatggatgtttgtacatatttcccccaaaagtagaccctgaaatagggatgtggatgccattcatttatttgagaggtgatccaaggaagcacaatgagggagtgagaaagtgaaacagtgaggaagcagaagccaatcgggagtgtattgatcagtaggtgaacactgtgggcaactggggctcagtcccactgacagccctctgagacacgtggagggcagcctttggaattgtcccattgtggagcaaggaagctggggtgtttatcaaagaattcctgtccctcactggttaaaagttgcttctgagacattaactccctggcacttttgcctaacccatgtagagatgacatgctcctgtggtcagagaaagccctcaagtcaagacagaaatgcttgagaaatgaagccatagacagggacaggaattgctcacttggtcttcagatggtttctgggatagtcccaggggatatgagtgaggcaccaataacacctgttaaatggacacagaaatgtgtgtgggggaaggggagggtattgtaaattaggaaattgttcatagaagtgttgtcttagcaagcttttgaaggtcaataggcattctcccagatggacagatatagaaagtgtttcagactgatgggacattatacacaagggcttagagatgtgaactagtgtgctgatgtgaaatatcccaagcagatgggtacagataagcctgcaggggaaggagacacaaggtgagatgatactactgaggcttgatagcatttgcactacatctttccaatgctgggaaacaaaatccacagcaagctggtgaaagggttttgtcagctgtggccaagataaaaggttttgtcatcgtggcaatgctgacaaaaccctttgaccattttcctgatctctgatctgcagtatcccctcaccacacacacacacacacacacacacacacacacacacacacacacacatttctgggcccatgtaacaggtgctgagtgtagcttgtggggctatttgggtggacaggcaaggaggtcccattgggggtctcggctagcctccagatttatgggacatgttttaaaccctctacataatttagcttcttgttttcccttagtttgtttacccactttgatggaaggagagatttccttttcctgaacttctcaattttaccctagtcattagcagaatcatgtggaataaagacctcaaggaaattgcggcattttcatttcttatgaggaagtgtaatttggggctcaaggaaaacagagcctgtgttattgacagaagaaacatgaccctcacaggggaaaagagaacaatatggattgggatattcttacttcaaacatataccactgtgtttaaataaataaataacccagaaatacccctggggggaaagcacaatgaacaaattatgatgatcatattccatctgtgcactgcatctgtgtttgaggtgtttgactctctgagtaggtcgcctaagcaaggctccaggagccaccactaatcttggcagcagccttgatgatgttctttctccattattttgtgttttacctcatgggcaaagaaaaaaggggaaaaaccccaatgataaaaataaaggatcttttgggagttgttcttgtttatttaacttccttcttttaaaataaagaaatgcagctgggagcaaggaagggagagaaaggtaagaatattttaaaactaattatagcataaaaatcatccaagagtgctctgttccggcctctgttaaagtcacagcttcgtccttatgcatgagtcagaggcacccaggggttaagcttgtgactgtcaagagccattattgcatttggttatttttgtgggatgctggaatgcagctagtgtcagtcccatcctgtgacacagggcagggtttctcaacactggccctattggcattttgggctgaaggattctttgtcatgggggctgtcctggtcattgtaggatgtttagcggcatccctggcctccatccgttggacagatgccccctcccagattgtgacagccaaaaacatctccaggcattgccaaatatcccctgggggacaaaatcacccctgtttaagaacaaatgacatagggctacaaaacttgctgctatggaagcaaacttgttccacataatccaggaggtcactccagttttttatccaaattaaaaaaaaaaacaaaacactaaaaaacaggtcctcacctttccccgctttggtctgtagttgctttctaacttctagagcctttttattgcccaaaaatatacagttccctacaatactttgtctttatttgatttttctcaggcctctcaagcagaccatggctgctgaacaaaacctagacccctgtggttgggaaccttgggtgagctgataatcagacatttttatatagtaaaaaggaaaagaaatttttatgtccttccttttaaaaatgatctgttgcaaattatattatttttaatttccaggaaaattgtcaaagttacaatctccttaaaggcaaggactatgttttgtacttctgattgtaattgttcacaatgctcagcacatagtagatactcaataaatgcataatgattaactgattgagatggatcaactagcatttagacttcagccatagaagcagcagccatagaaaaacccagaaacaagcaaatagacctctagatgagtatctttacttgagtgagtcattagtaaggaaataagtatcacagaaatacacctgcttttctcagttcagattggttcagcagacatatattgagtgctttgtgcagtggggactctcaaggcacttaaaagcacataaaaatacttcagtggataatttcagtgcaatatgggacattctaagacagaggggcttaaacagctctgtgggagcccagtagaggggcaccagcatagcctttgcaaggaggtgagagcagggttggaaggtataatacttgagctatgtcaagggacagtaggcatgtgaaggggtgggaactgaaggggtgggatggtggcaaggacagtccaggcagaggaatagcatgaacaaagttacgaaagcatttattggcatgattggtatgggaggaccatcatgtatgatttgatgttgcaggggctgggaatgatggaagatgaagctggagacatggaaaggccaggtcatggatgacctgacacccctaccagggagtgggggccctcttctgcatggggagggcacagaaagggtttaagcgagaggatgaggcaacacgatttgtgtcttgtgcagcaggaagcatgggcttaaagagcaaaggtcagatcaggcactgccatgacactcaagaagagaggtcgcagaggcttgctctaagtaatgaaaggtgggtggtgcagagctgagaaatggagcaggatgtccaaatagactgaaccacaagtggaaaccctctgaacaagggagagcccacaggtggttgggtggcctttgaaagatctgtggagatgtgaaaaggatttcttccttacctttatgctgctctctctttctctgatttttgtgtcattttaggtagagaagagaagctatcttacagatattccttatcttacagatattccttatagaggcctttgtggtttcaaggtctctaagctcatcaaagaggtgaagttggatatcacagaaggagcagctggtgtccccaaagggtagagctacagggatgggagggaaaaagagggagggtccagattttgaaaggaagagaggcctagattcctaagttagtgtctctaacatgacagatgctggaaggggaatgatctgagtcggaaaattatatttgatatacttaataccagtgaattcaggactacttgtgaagttctggagtgcaatgctaagatctggagtgcaggtgaaagtgcttagaattgagcaagtcaagaactcataaggctggtagtgtgttgaatggaccatcctcggaggcattgacatgtcccagaattgaatggagattcagtccacccctaagattggtgtggcctctgcaagagttcaaatggaggtgcctgccttcttttcccacacccacccccatctattctgagatgtggaacaaggaggacagggcaggtgggatgggcttgaacatccaagctccactcacaccttcccaaccagtagctacttggatgcctctaggagtgcacacaccagtagcgctgctcaccctctggaggacagacccatggaggaggccctggaagtgggctcagggccatatgggcaggcactttgaaggtcctaggtatccagaacatagtcttgaaagagggggcatgggctgtctgtgagactcttcccttggccccttagatttcttgtctcttagagagcagggtcctctaaaaaaggggcccagggtaggaaccctggtggattagatctaaaggcagtaatggcaggtttagagatgcagaaaaaggatatgagtcagggccttggtcttcaatgaatgtgtgtgtgtgtgtgtgtgtgtgtgtgtgtgtctgtgtgttttgagaatatgggtggcagtgatagcaaatagaggggaaataaataaatataggggaaataaaggtgaagatccaccttaatccaactcaattgccttagaatccagtgagatgtaaggttatgctctagcaggttgattttctggttttccctggtaaccttcagttcctgcagagttaaaaagacaagcaagcagagtgaggaaatgctgagagatgacacactgagaagtggtagctggcagcaaaagacagcgaaagagtgagagagaacagtccccaaatagaaaaacatattaggagggggtcatctagtgccagggcaaatagccttacatgcctcaaaagctcctcaggatacaactccattacagcatggaacaatgatgaatgcgcttttagaagtttccatttttgggaaaaagcatttgctttcagttgtctaaaaaatccattaatttaaacctcttctttctccaacaactcgtgatgagttggatattgctgcagatcccatttcatctgagcatcagattctgttacctctcctctggttcagtatcacctgatcaagtttgatattgcttttcctcctcctgcccccctcctggagaatttcacctgcctcatccacagaggagcattgtatggctcattgcgtggtcaggcaggataaagtcagctccactaatctaagcccgaaaatgaagcggcaattctgctgttatgccctaattcacaggctcatcattaaattgttatcatagcctcagacgagacttttaattctcttacaacagctggcaaatggcaggaacagatgctctcacccactgaagcagcttctgcaggagcagtggagaagagagagaataatggataccagcaaggaaggttcagacactcccttatccgccactctcaatcctggaaaatctgggcttccactttgggagtcttattgcagctcaccaggagctggtcacagtatggaaccaagagaggtgtgggcctgggagagcttttgtgtggcttttagagctccccttagctccgggtggattcccacaacttccctgtatcaagtcctccctctaaatgttggctctaaaagcaagaatgcagatggagtccccacctcatgtgatgctatgcttaccctctttaccctgagcaagaaaggcactgtgggccagtctggcaaccaaaccattgttcataatatcgcttttatggacagggatttccagtgccaaacgactgactgacaaacaaatttgagtaatttggggccatcgtgtttgtacatgtgtgtgcatgtcatgccagcatgtccccaacactcatctgcagaatccacacccaggctctggggccattcctgatctgaatgggtagatgagacatgatatgacagtggcggtgtgggaggaggaggagaggagccgatgtgttttacgacccttctctgtagcatcaaggccagctcagtaggataaagtgctctggagaatgaaatcccacttggtagtatcaagcgtagtattaagagctgacaggttttccaaccccattctgcattaccgagtatcagaatgtctataactactccgtaggtaggaattactgacaccctttaagagataaggaaactggactgggagagattaggtaacgtttcacaggtggaggggaggtcaaagagccaggattctcatttaccccatgctctaaccagtgtccagcaacctctcctaaaaggcaccttgggtgcttatactttgtacttcaagggctcatttgcctgagttttctgatagtccaggactgatcttatctcttgagtctaacaataaggctttgtcttgttccccgtggctggtcaccttgatttaggtctcatttctgataactgcatccttatctaattcctcttcatcaggtgccgctcacgaccaggatctccattcctctaggacaaaatattcaccctgatctttccactgttgcctttaagtcccagctactgggaccttagtcccccagtgccaccttctagatttatagacaatgaccacttactagttgcccccattgctgacagtcggcttccctgatccacattgcctctctctgatctccaagctcctatcctcagcccacctgtaagcatctggccatccctagccactgtgtaatgcctcatcaacatgtcctgtctgtcccctaggtccgaaccactccaggtgccactgaagcatttgtaagagacctacaagcaagcctgaattttcctaaaggggtgccagggagtctggaccacacatttctacttctgccttgaccagagccatcccccaagtcttcccttagagatctgccttttggaaactctggccacccactgggctggcaattaatgatcccacccagcctcttaggccgtttcttatcactattgctgaccccaggggttcacttggaagctttctccaatgcattttccattattgattaaatatataagggagaaaagctttaattattagtaattctttcttgcactgacttgcaagaaaagcactcagagcaagggaaaaatacaattcccagaggtcctcccagcttcgctctgtggagagcaaaggaagtatgaagcctcaaggtctcccagctttcctagtgcagcctgggaggtgtggtaactcctgtggcattctctgctgcggtagcaaggtagaaaatagtgatagtggagagaatcatggatgaggaaagaccctcacaatgaatgtcagggaaagttttagagcagattgagaggtgtagattgagagggcagctttggagtatgagagaatttaaaaggagtcaaaatttattatcattattatattatttattacacaccatgttgcctaggattatacacaggattccccatatttaagagatacaatgaaaggatggttactaaaattacttttagtttctgaagtgcatttatttgaatgtgattttggaaagagactgggccatgtggaactccagaaccataaaaaccacatgtggatactgccccaggccactgaagaaaacataattgttttgcaaactatcatctgacaagtccttaggaaggtactgttttcatctgaagataaattttacctaaattctaccatgtttttcaatgctgcagtcctcctcacctggaatccttccatccttggctccctgtatctgcaatgcaaaagaaatacaaacatttacctatagcaaaactctgagaatctccacaaagtcaggctgccaggaaagcctaagagcctgggaaggagaaggaggggacaatacattctgcatggtttaggcatccttgctgcccagtgccttttaatccccttggcaaatggcctgggtttattttttagagtgggttgggcaaactcagatggaaaaggcaatacatggctggagcacaggagccatgagtagaaaatatgggaccctcggccgggcgcggtggctcacgcctgtaatcccagcactttgggaagccgaggcgggcggatcacgaggtcaggagatcgagaccatcccggctaaaacggtgaaaccccgtctctactaaaaatacaaaaaattagccgggcgtagtggcgggcgcctgtagtcccagctacttgggaggctgaggcaggagaatggcgtgaacccgggaggcggagcttgcagtgagccgagatcccgccactgcactccagcctgggcgacagagcgagactccgtctcaaaaaaaaaaaaaaaaaaaaaaaaaagaaaatatgggactctccaaattctcaccttgtggtgctaatcccatcacctatagtaatgttgcaaggcaggtgaaagcttgaattctatctccaaggttataaaggaggtataaaataaaacatctatcaaatattttgagacccttagaagcacagaatgttatagctgaaaatcctaggtgtctctgagaatgtggaaataggccattttagcttaaaacaaaacaaaagattgcaatctactgagcctgaagtggtttgagatctatgtatgcttaatctagcaatgtatgtcccaaatactgcaggtcctcttgactttaatcatggaaagatgatcccatattcattgagaagaaataaataaagcagcctctttaacctgcctttcccaaataccaaaaccactcgtttgcatgtaacacactgaaggcatcaggtaactattgagtgcttttctccatttcatcttagtaggagtcacactttttactccccttttctgcttttggtaagcctcaggctttgccagtgaggaagagaccctttcaaaatattggacaccagatacaggatttggaagaaattggagtgatgtcatctagggaaaggcggtccaaaaaagagccacctaaaggctggaggaagaatcgtctgaaaatattagagggaacagtatctgatgttcacataggactggaaatagtgtctgttctgaaccaggcatggaaagaggcaggaaaacacaacctataatgaggaaaataattaatcagtagaaaccatccccagactgacacagatgttggaattagcagaacaggacaccaaaatagtttttattttgagttcttctatatttcaaaaagttaaatagaaatgtggaaaatataaaagatccaaattgaatttctagagatgaaaactacaatgcctgagattaaaatacactggatggaactgatggcagactaggcatttcaggagagaaaagattcattggacttgaagatcgaggtatagaaactacctaaaatgaaacgcagagagaagaaatagtttcaaaagttaacagagctgtccgggcatggtgggtgctcacacctgtaatcccagcactttgggaggccaaggtgggctaatcacctgaggtgaggagttcaagaccagcctggccaacatggtgaaaccccatctccacaaaaatacaaaaattagccaggcatgatcttgggtgcctgtaatcccagctactcaggaggctgaggagggagaattgcttgaacctgggaggcagatgttgcactgagctgagatcacgccattgcacttcggcctgggtgacagagcaagactccgtctcaaaaaaaaaaaaaaaaatgttaacagagcatcagtggtgggacaactccaacagcctaatataactgtcattggagcaccaaaggagaggagggggagtaggagacttgaaaaaatatttgaggaaataatgtccaaatttttttttcaaatttaatgaatactataaactcataaatccaagaagctcaatgaacaccaagtaaaagaaacatgaagaaaagcatatgaaaataaaatttcataaaagcacatcagtataaaatgtgtcaaaaaccattgataaagagaaatcataaaatcatccagagataaaagaccacaacattcaaagggacaaagataaggataacagcagatttctccttgggagaaatacaagtgagacagttgtatcaatctagaatactatactcagcaaagctatctgtcaaaaacaaaagtgaaataaaaacttcttcagacacaaaaatctgaaagaatttatctccagcaggcctacactgtaagaaatgttataggaagtttcaggcagaaaaaaaaaagataccacatatagatacgggtctacacaacagaataaagaacattggaaatggtagctacatatatatgtgtataaaacttttccttatcatttaaatgcctttaaaatataattatatttttaagcaaaaataataataatgtattgtattgtagggtttacaatatatgtgaaaacaaaatgtatagctaacaataccacaaagcccataaaaggagaagtggaagaaaggattttatactatacataaaaatgctataatatcacttgaaggtagaatgtaaaatgttagagatgtatattataaaccctatagcagccactaaataacaaaacaaagagttatagctaataaaccaaggaaaaagatgataaaaatattttttaaaaaaccagcgtattggccgggcacggtggctcacgcttgtaatcccagcactttgggaggccgaggcgggcggatcacgaggtcaggagatcaagaccatcctgcctaacacggtgaaaccccgtctctactaaaaatacaaaaaaattagccgggcgtgatggcgggcgcctgtagtcccagctactcgggaggctgaggcaggagaatggcgtgaacccaggaggcagagcttgcagtgagccaagattgcgccactgcactcccgcctgggccacagagcgagactccgtctcaaaaaaaaacaaaaaaaaccaaaaaaaaccacagcgtattaatccaaaaaaggcagaaatcgagaaaaatggaacaaaggacagctgggacaaatagaaaaaaattacaatgatgaactaaagtctacccatatcaacaatacattaaatataaatgttgaaacaatctcaattaaaaggcagagattgtcagagtggataaaaaagcaagactgacctatatgttgcctataggaaacatacattaaatgttaagatacaaatagattaaaggtaataggatgatagaaagacaaagtcttgtcaagatattcgttctttccagcttgttgtaaagattcatcacaattcaaaaaaaattaaaagtccctgcaagatattttgtaatatcaacagagattctaaagtttatatggagaggcaaaagacccagaatagccaacacaatattgagggacaagaaaaaagtaaacctgatactgcttaacttcaagacttactataaatctacgataatcaagactgatattggtgagagaatcgacaaatagaacaatggaattgaatagagagctcataaatagaccctcatgaatatagttaactaatctttgacaaatgagcaaaggcaatgcaatgaggaaaagacagtcttttcaacaaatgatactggaataattggatatccatatataaaaagatggaactagacaaagactttacatccttcacaaacagtagctcaaaatggatcataagcttaaatgtaaaatccaaaactataaaactagaagagttaataaaagaaaaagaaagaaagaaaatctagatgacctgggatttggcaataacttttagatgcaacaccagaaccacaatccatgaaacaaagaattgataaactggtgtttactaaaattaaagacttctgctttgcaaaagacattgtcaagagaatgagaagacaaaccacagatggggagaaaatatttgcaaaagacgcatttaataaagggcagttatccaaaatacaccaagaattttaaaactgaacattaagaaaacaaacaacctgatttaaaagtgggcaacagatctgaacaagcatctcaacaaaaatatacagatggcaaataagtgtatgaaaagatgttcaacattatatgtcattagggaatttcaagttaaaacagcaatgagacattgattagaatgttgaaaattcaagacactgataacaccaaatgctgacaaggatgtggagcaacaagtactctcattcattgctgtggaaatgtaaaatggtacagtcactttggaaggtattttggcagtttcttacaaaactaaacatactcttaccaaacaatacagcaataatgctccctggtatttaccaaaagaagttgaaaacttatgttcatgcaaaaatctgtgcatgatgtttatagcagctttatttataattgcccaaacttggaagcaaccatgatgtccttcagtaggtgaatggataaataaatggtggtacatccagacaatagaatattatttggtgctaaagagaaatgagctattaagtcatgaaaacacatagagggaacttaaatgtgtattcctataagaagcctgtctgaaaggctgcatacttttgattccaactatatgacattctagaaaaggcagaactacagagatggtaaaaagatcagtggtcatcaggggttgggagagggagagatgaaaaggagaggtatagaggatttgtagggcagtgaaactactctttgactccatgtcttatatccaggtaatgccgatgcaagaggtgggctcccatggtcttcggcagctctgcccctgtggctttgcaaggtgtggcctccctcccagctgctttcacagggtggtgttgagcatggcttttccaggtgcacagggtaagctgttggtggatctaccattctggctctggaggatggtggccctcttctcccagctccactaggcagcaccccagtggggactctctatgggggacccactccacatttcctttctgcactgccctagcaaaggttctctatgaatacctcaccccagcagcaaacttctatctggacatccaggcatttccatacatgctctgaaatctaggctgaggttcccaaacctcaattcttgacttctgtgtacctgcaggctcaacaccacaaggcttgggacttgcaccctctgaagccatggcctgagttgtacattggccctttttagtcatggctggagcagctgggacacagggcaccaaatccctagactgcacacagcagagggaccctaggcccaacccatgaaaccatttttttctcctaggcctccaggcctgtgatgggaggggctgccacaaaggtctctgacatgccctggagacattttccacattgtcttggtggttgacatttgattccatgttacttatgcaaatttctgcagccagcttgaatttctcctcagaaaatgggattttcttttctattgcattgtcaggctgcaatttttccgaacttttatgctgtgcttctcttataaaactgaatgcctttaacagcacccaagtcacctcttgaatgctttgctgcttagaaatttcttctgccagataccctaaatcatctctctcaagttcaaagttccacaaatctctagggcaggggcaaaatgccaccagtctctttgctaaaacataacaagagtcacctttgctccagttcccaacaagttccttatctccatctgagaccatctcagcctgaatttcattgtctgtatcattatcagcattttggtcaaagccattcaaaaagtctctgggaagttccaaattgtctcacattttcctgtcttctcctgagccctccaaactgttccaaactctgcctgttacccacttctaaagttgtttccacattttcgggtatcttttcagcagtgccccactctactggtaccaatttactgtattagtcaattttttcactgctgataaagacatacctgagactgggaaatttacaaaagaaagaggtttaatggactcacagttccacgtggatgaggaggcctcacaatcatggcagaaggtgaaaggcacatcttgtgatggtagacaagataagagaatgagagccaaatgaaagggatttccccttataaaataatcagatcttgtgagacttagtcactaccatgagaacagtatgggggaaactgcccccatgattcagttatctcccactgggtccctcccacaacatgtgggaattatgggagctacaactcaaaatgagatttgggtgggtacacagcacaactgtatcaatgaccaactttaagatacactctaataaaattgcaggactttacagagaaagaaaaatactttgagcatctagaaaaaaagagtacgtggcatgaaaaagaaagaaaattagattattatcacactttttgccagaagaaaatgaaataacatatttaaggtatccaagacagaaaatgtgagcccaaaactgtatattcagcaaaactgactttcaacataaacataaagggtacagacatactgtttatcaacaacttagggaaactggctccataagtccctcctaagaagtcttctagagcacaaaccttgggtaaccaaaataactagagagagattcgtgtagagcattaaatacacagttacttgtgaaactaagactaaatgagtgctaatgataaagtgtataatggctccatgtcctgacaatggagacatagtacaactatttttttaagtggggtggatcgagagatcttatgtaaaacacttttaaaatgtttttggtcataataatgatggtaggattagtattttattctgagtctgctgtgtatgcaatatgggataaaacaaatgagtaattgtaggatattctaattctatcatcctctgtgtccttgagaataggattcttggcatggaagaaaggatatatagatgaaagaggttaataaaagttctgtcatcaaatatgctttctctgctatataacagagctgggggctgcagagggactatatacatgtattccctctgcaacccccacctccattcactgaaaaggtctagaaacaatgatcaacctagtagcaagggacatccctagcattcaggctgattctgaaataccaatttttactcaaaagatgcaaatctccttagagaaatggctaattccaaatccaagttagaaagtgtccaagaggaacaatttgtcacaccagtcagcaaggaagctattaaagactactggggtttggctgggcgtggtgcctcacgcctgtaatcccagcactttgggaggctatggtgggtggatcatgaggtcaggagatcgagaccatcctggctaacacggttaaaccccgtctctactaaaaatacaaaaattagccagatcccagctacctgggaggctgaggcaggagaatggtgtgaatccgggagatggagcttgtagtgagctgagatcgcgccactgcactccagcctgggtgacagagaaagactctgtctcaaaaaaaaaaaaaaaaaaagagactactggagttctgacaaaaggcctcaacagccaaattgtagagaatcccataacaaaagataggaacattttggcttcaacaacaataatttcaagggaatgaaagtcattacacatgtttaaatccacaattcacaatggtctttaaaatttttgaaagaattagtcatctaaagaggaggtgggctgttgactgatcctgctttccccatatgaactgtacctgtgagcacacatacaggttgagcatccctaatctgaaaatctgaaatccaaaatactccagaatccaaagctttctgagctccaacatgatgcaagtgaatgacgatggcattgttaacactgcagaaaaaatgcctatggatgacttgctgaaaatgtgtggtgggcttattgagggactacagcagcatgcattcacaacagaacaagaaataaaggcagtttgtaacatcaaagagagacttgcaagacaaaaactgtaattaatgaggcagatgactctcgaagaaacattttaaaaagtcatccagcagaatgttttctcatccctagcagacctatatcctggtccctcagctacttctgatgttccttcttacctaaaagaaaaaaaaaacaatgtacagtaaccttttaaccaaaatacagcatcttaggtggagactgaagtctacctttgttgttactgctgtttcatagctgatgcctgtattctggtgatgctactgtgctgcttagttaccctgaacacatattttttcactgtgtcaatgatatactttttgctaagtatttatgcatgaataagtgtgggaaaatgattgcttattggtagcatatacattcagagtcaggaatgatggtgatgccaagcaaccactgattgtccatatggatggctgagatagtgattctttgctttctgatgattcaatgtacacacattttgtttcatgcataaaattatttaaaatgttatataaaattacgttcagattatgtgcataaggtgtatatgaaacataggttgggtgtggtggctcatgcctgtaatcctagcaatttggtaggcagagacaggaggatcacttgagcccaggagtacaagatcaacctgggcaacataaggagacctccatctctacaaaaaaacaaaaacaaaaaagaaagaaaaattatctgggtgtggttgtgcatgcctgtggtcccagctacttgggaggctgaggcgggaggatcacttaagccagggatgtcgaggctgcagtgagctgtcattgcaccactgcactccagcctgggtgacagagtgagaccctgtttctaaataaaaataataatagtaaggtatatatgaaacataagtgaattttgtgtttagacttgggtcttattcccaagatatctcattatgtatatgcaaatatttcaaaatccaaaaaactttgaaatctgaaacccttctggtcttaaccatttcagatgagggatattcaacatgtagcagatgaaggcaataatctctctataaaagcatttcccaactgataaatgaaaattaggatatcaccaacttgcagtttctaatgaatgaacaaatataggtagatgtagtagatataggtataggtagatataataggtatgggtatagagaccaaaggaaccaggaggagaggtatgggaaaaacatacttttgttgttctctgggcagacagaaataatagtgaccactgccactgcactccagcctggacaacataacaagactcaactctagtaatatatttttttaaaaaaaagaactcatagagctgtggagcaatagcttggcaccatttggggcaggcctgagcctgtgtgccccccttccctttgtgtggtgtcctaaagagaggatctgatctggtctttatgtcaccattcatttatggaaagcccccactggaaagaaaagctcaaccaggtgaaatttcaaatcaacttactttcaagataaactttcctcaagtctggtctaccaatggttgtcttgatttaggtcctaagtcctggtccaattagttggagccagggtaatggagctaattttactggaagcaccatttaggaagggcttcttgggcagatttttctaccttcctcatccaaggactaagctctggccaatgagacttctgagaagtcttaaaagaagaggacacaccctcctctccttccttcaccagcttccagaaacaagaatatggtggactcctacagccatcttagaacatgagaatgagacgtttaaagggaaggcagagcagagaaaactaggggaacaaacagtgtcggtgatgatttcatcaacttgctgtgctggcctcaggctacctacctctagatttgtgtgaaacagaaagaatccacagttatttggaggttttctgttatatacaattgactattctcctcattgttataacccccatacattccaatctggtaaaataggcaaatcctgggctctttcccctaaggacatcatcaaatggctgcctaaactgataaacacagagcactatagtgagtaatggcagcaggtattacttttgcaggagtgtgagtatttcttttttcttttttgagacgaagtctggctctgtcacccaggctggagtgcagtggtgcaatctcgcctcaatgcaacctccgcctgccaggttcaagcgattctcctgcctcagcctcccgagtagctgggattgcagtcgcctgcaaccacgcctggctaatttttgtattttagtagaaatggggtttcaccatgttggtcaggctggtcccgaactcctaacctcaggtgacccgcctgctgggatcaacctcccaaagtgctgggattacaggcatgagccaccgcaacctgccaagagtgtcagtatttcaataggaatcttccagactctcaatgccctaggcctaggtaattaacctctgtggtagacacttttatttgcctgtacagcactccttctcccttgccaacaaagtgttaattttgttctggtattacgtgtctgtgtgctaagatgaggctggaattttctctctctccacatggttacttatacctactcctctctgcatgtctggctcattcttcctgctctgctgtacaactttctttgcatgtggcagaaaatggctttgcccaagctctccaactgacatgcaccatacagactagctgtttctgaaccacatttctaaatttctgagagtgatactggctctgctttagttaagtacattcctctgatccaataaactgggtcgaggagggctgtgtagtacctacatgatagcaactgctgggggcatctctatgagaagtttgggtgtagcactcagagaagaagtgcaggaactgggcagacaccccaagagggcatctgctataagcttgactgcacttgatacatactagcttcctggtccccatagctatactcccaaggctgtgatcttactgaggccagggcccagaagggtcactgcccagtatagatactgcagaaggaccaccagatattgtaggtagacaagatggatgtaatacccatcaatgccaatcaccaaatctttccagctctctgctttctggatgggtagaattttatttcctggtcccctgaggttggatggcgctatgtaaccagttctggtcattatggcatttaattactggtgaaggggcttctaagatggttctttccttcttccgtgatcattggtaatgtttcagatggcggttgctccatcagttggatcctaatgtagatgttataatgcaatgggcttgtgatggacagaatataagcagaaagatgtcactgagatttgtgagtgcttgttactgcagcatgcctatcctaccatgggtgataccatgcagattgggctggggttagcagcattgctggaagaagacacttgaagattctaactcacaaccaagcctgtcacacagactttttttccttcctctgttctgggtcccccttgaatcccttgtccctacttcagaaaggaaagtgctgtttcctagtagtgaaagcatcaaggagcaataaagttggagatttctttcttgcttggacaggggtggtgcccaggggtgtgctggacacatggacagagtttggttaggggagtttggtgctcacaccagactcagagagagctgtctcttagctgacgctcagcttagttcgcaaaaggacagaggccagggtagggggcgcagcttagctctaaactaccaggtaaggatccaaatgctgtcccaccttcctgcaaaactcatggaagtcaggctgaggagtctggaaagctaagccgaaagccaggggggctccagtacatgcagatcccaaatgtgggaatgctatgtgatgattttatgaaatacaaaagtcaaatgaatttttcatgaagaagttatcttcccaagatgcaataatggaaaattcctttcaagaactggtgtttagacctcacaaaaatgcgcggcaaattgcattgtgatttatttgtcaatgtttttataggttaggcgttactttcaaccccacagctggagtcaatttttaatatttaaaagtggaaagaaagcaaaacctaaacacatccagagctgtctgttttagattgtgcttttcccaaacagtgatgtttagaactgaaccctgagcgtggtcggtctgtggccagctggcacttacttctctgcgatatagaattaaagtatctggaactgggcagattacatataagacctcctaaattgtaattggtgggtctggtgtttataaccattttcaagtgcacgtagcctgtctgccctctgaattgaagaaggaaagagtctttgtgctttttattctgggttttccttcatgccctgagcttaagatgccatgaacataattttcaagtccagtgggttctggccttattagctgactggattagcagggatccagcactccaatcaactatagagatgcaaattgggtctccagactttgactcctaaggagcctagtctggaaatgacccagggtttacctgcctgggtctccaggtaaaaccaggatgctggccttgaaggtgggttctcacagcaaggattctaatctcaaaagagatcaagccttgaagcttaatccgattctcttgggccaagtgtccagactctaatgggagtctcattttcacagaatggtactcccagaagcacgggattcatacctcagtgcatagcacaccgtacctcatgcttaactgcagccaccatggttggaggtgtaaggctggcactggcactggatgtggctgaggctgccatgtgtgtgcttactaataaaggactctgtaacacacaacatctggagggaggaaaaacaactctaattgtgataggcacaacccctttgggtaacatagttgatacccttctaatggagggcgtgtttctctttgccttctcctttctgcttcctcctgataatttggccaaggcccacaggagttgacccatttccaaatgtgtgagtgggtccagctgaatctgccagtggggggcctttgaagctgtgaacaacaccccctcatcagactttgagacacatccaccccttaagagacaagcttcaggatataaggagcctcggcaaagcatggaaatgtcagatgtacaagcatctggggctcagcttcagctactgtggcctttccccaggacccatgcccagggtcctcttcctgaactccagcatcaacagacccccttcaataaactccaacattcagaacatcaacaagcgaggggatggggaagggcagtgattattccaagggcagagatgctatcaggttttgctccaaaaaggatttttcgcctcacacaagaatttgctacggatttccttttaaaagtgcacaccccaagaacactcagcagctgattcagcttaatgtgcaaatccccaggaacacaatgcgtgaagtgaggtacacgggcaattggggccaaggtgcagcagaacttcccaccagcagggggagctcttccccgggtcaggcagccatggcaggtccaatcacacgcccgttacccaataaaaacatgctgcagtttcaagagggaggaacagaactgaaccctgctgtccaaaaaaagacaccacagatgcccagtaggcttgtgctttatcctgagggcaatggggagccacggaggattctgagatgtgtagggttctatcagggcttccagtcgttcttgcccagtgcctgtgacttctttgaggaatctatttccagggatggtgttccctgcattttcggctcttcttttaaaatgcattacagtgatgatccatgagccaccttccagggacccagggcaggctcaagcttaggggtgtttctcaagaagtgcatagcttcgtgtgttgactcagaggaaaggtaggcatggtttaggggaatgaggggggagtgacaggcagaaatgctattgttttttgctgcagtgaagcgccaagccttcaaacaagaagcttggcaccaaaaatggtgctgttagaaagttaatgggcaagacattttgagaaagtgttgtggagataagcatcaagaggaaacgtcactgttttaactttgccggcatccaggaaaccaagaaaagcagagccacccctgagctggactgcagcgcacacacgcacatgctcatggaatccaagccctgtccagagacaaacatctcccagaagcaaatcaagagtgacttttccgaagaaagagctggggaaatggtatttccttcctgtgctgaagaacagagttacgacattctagggaagagatgtgagctcccaggggcaagaactgggcaccatcccgctattcctgctgaatattaatagcaaaagcaaatatcttgacttcagagagctccaaaagacagagtcacccaagaggaagtgatgaaaaggagaaatgagtgccgggcgcggtggctcacgcctgtaatcccaacattttcggaggccgaggcgggcggatcacctgaggtcaagagtttgagaccagcctgactaacatggtgaaacccatctcaactaaaaaaaaaaaaaaaaaaaaaaaaaaaaattagcctggtgtactggtgggcgcctgtaatctcagctacttgggaggctgaggcgggagaatcacttgaaccggggaggcggaggttgcagtgagctgagatcaagccattgcactccaacctgggcaacagagccagactctggctcaaaaaaaaaaaaaagaaagaaagaaagaaaaggataaatgagtgttttcttgaatgctttctaccagaatcaggccactgtgatctccctcactgcaatagtctcctaatgggtttgcctacctctgatcttgacttccttctcccattcagcctccatagagcagccaggaggatctttctaatctgatctgcttagaatctttcagtggctcgcataccccaaatctttgatataagtcatgaggccctccagactctcatctctggggaaatctcagaggctcatctcttgccacttcttggtcttgccctttctgctctaatcattctgaaaccctgtagctccctgaatgtgccatgtttccagtggcatgggaagggtaaacagtcctggggaccttgtagctccctgaatgtgccatgttttcaggggcatgggaagggtaaacagtgctggggacgttgtaatgtaccttgtgtcctttctctttatcttggctggaagttgccaagactctcatctttgagggcccaccataaactgggacatatggtctcttctgtcccctctttgctgtatccctgtatggtttttacttaccttcggggtctttgcaaatacctgggggttcccctttcatccttttctccccattttgtccttcaaatcttgaattagaaattattacattagaaaagcctattctgactccccaaaactgggagggacacctggtatctctctcccacgttgccctgtgcttatctctcttgcaccatttgcacactgtgtgtaactccctgcagacctgcccatcccatccaccctgtaaacttgcgctccacaaaggtgggaccttcttccctctgtgtctccatgcctagtccagtgcctgtcatactgtgggagctcagtaatatttcctgaatgatcatattcctttctccaaggctacgaagacaaccatgtctttttgagccaatttctttctttttttttttttcattaatttccccaagcccccaacaaacagtaagatctatttttaatgatgccacaagctggcctgtaaatgatgcattcattgtcagatacatttggccgttgtttgtacttgcaaggaatattcctccttccttgagagctctcactcacagacactttcattactttaatattttacgatgcagccattttggaagacataagggcatcatctctgtttaactaaatgtcaaagtaaagtagtcaaggctagtggctctcttggcatgccagtgattagatagctttgttaacaggccagttgggctgaggctatgtgattacacgctctcagctacttctatgcaaaatgatccataaacaaataaagatcatggattgcaaaaacattttccaggggtgtcagagtgtccctaaacgttcagttcactctcttcaaccttccacatctatagcacccaagctccacaggacacaaaatcacaaggtcaaaattggattttgtcagtctgataatctgctattttcacactcctgtagacccaaaaccctgcagaatgtataaactaaggtattagattacactgagtaccccccttcccaaccagactggacaagagagaacttacacctgactttaatgagtgctcagaagtggccagcgcccttggaggctgaagagcttcatgctgggagtttaaggcccacacactctgcagaccaggccttgcctcctgcccacggtgccagaggtggtagctgcagaaaaaaaaatgcagtgcttctttttaaaacaaggcatgacccccatatatatatattatggtgtggttaagggcataggctctggtgctgggctgatggtttgtagtttgttctggcacttgatagttttgtaaacctgtgggttatttaacctctctgtgcctcagtttcctcatctgtggcatgcaggtaataataatttcatggttgttgagagggttaatgaagtactcagaatagtgcctgacacctctgagcattacaataaattgagctatatttatgatcttaacaaaaaggatggtcaggctttaacatctgtttgggttgccttgaagtcatgagttcaaaatgcctgcctccagtcccctctctgtgttaacaacgacaaagcagcgtaccttgtataaatggcatatatttcattgggacactggatgttttcaccccaggcacaccagcttctagaaaggacctaggaacaaggtggttttgctggtctgatgaggttggagagagctgcagggacaggccttcaacatgtggccttgtggcttcagaacaagggagccacaagggggttctgtagcttcttggctcagggcacctagcattttgaactcaagccagtcccaagggtttggtgatctcagctgagtcctcactgccagcctgaatcctctgtcaactggaactggctttgcagatgctgcacaagctcctggcagactccatttggttggattccaggtggcaaatgtccctctggggaggattgtgcaaaagtgttccttcctcccagaaggaaggtcggttaaccaacaaagaagtctacctagaagagagcaaaggagggtggaagagcggaagttaggctcattttaatagtcaagagatccctttgagagaatgtagagacgagcttgggtgaagcttgctcagtggggagaagggaaatgcccggtttggatctttactggagcaagcactgacagcacttattgatggcttggatgtgaggggtaagagagagtgggctcaagaatggctgcaacacttttttttgagacactgggtgctggcgtgccactgtctgcacactccctttacaggttgagctggggggctgtgaccgctctgctggtcctgcttctattattctattggtcaaagctaccctccccaaggtcaagacaaatccactgcgctttagaagatccagggtgatgggcgatactgtggggggacacttttccctgaagtcaaatctgcatccacccagcgtctagctgattcccgaggtggattgccaggaatgtccatccttccccagatctagggcaaaggctgcttatgggaggagagcatccatttattttacctcaaacaaattcctgcagcacaggcttagaagctggggtgaagtggggcaaaagtatgatgcttccacctaaattcctatcacacagtcacagctaagcccagggctgtgcagaagaggccgctcccttcacttccttagccacacctcttccctgggtctgctcccacagctgggcacctcagcaacccagaaggatagatattctgcaggtctaatttgggtcagcaaattcccatttgcagaaaatcatttcagatctgacaagagttagtgatctgtttctaaaaagctttgacacaatcattatcagtctctctctcacacacactcataccatgttatctacagtccaggaaaggctcatgcattctgaatgtatactccaccctcttcacaaaccactgtaaaattctcaaagcctacacatgcttgcaaatagatcagccttaaatggagcagggtctttgaagaccccatgagtcatgtagctaaaatgtccactggggagaccgacttagcagcatgcatttttctataacaaatcaagttcagagctttccatggcacccagctcaatgccagagaaggtccatctatctctggtggggagccagtggtcaggaaacatatgaggctaaatgctatgcccttcacctggtggaaatgcacccccagaaaatcacttcgcagaataacaaggagactcatgctgctggagtagaaagagcaatggacaaggaagaaggggcccgggttccggtacaggctctgcccttactgtgctcccccaaggaccatgcctaccatcatggggctttggtttccttgtctctgaaaggaaagggctagatcagattaaattaaacaatcactaagtaccagatatgtgcaggggaaatgttctgttggaatgaaaaaaagaaaaaagaaaaaagccaaatttcagctccagtcctcaaggaacatgcagtctagttgcagttggttagccatggtactgcttggttagaacttgaggccccaaggggggctgagtgacattcacctctttgagatttaggaggcagagcctcctggtctcatctcatccctccctgacttgagcagtctcaggttggaagtgatgtcaccgcggagatttcacagccagaggagggcctgaggaccccttcttctgccactggccattgctatagtatggagcctctaagttcatataccccaccagacactcaagagtgccaggcaggatgggaggggagtacagatggtcaagatgctgccctggcctgagctgttgcccagcgctgttctctctatcacagtcaggccaaacagacctcagctgggaagcccggagctgagagaaatcttagtgagttggtgggtgtcactgtctgctggagggccactgtgggaggcagcgagcctggggttcctggaggcatctccagacagcctggagcctgggtagtgggacaagcagtttcctatgaggcctcaggctggagggtcgtcttggcgttaggatccggcagatgctgggtctcacatacagcgcctctcactcccactcgcctgctttccatcagccgcccgcttccttccacatctgtgcactcagcagccgtggctacctatgaattcccacttggaagaagcagatggtgctttatagccactggctgccaactccctctgggcctatcttgaagtcccctgtccctctccttctgcctctcacactgggtctcgggaggcctgccagtctgtttccccggaggctgagtaagagccccaattccaagccatatttctcttctttggtttctatttccttaacagtgacctctgtccaagggcagcatgccccagcatgcgcctctctccctctgctcttccaaacgcaattatgtggctatcactagcttagtgccaggacttggattcctttagctcttaggctgctgcttctccatcttcccccacccctatgccagattcgttctctgccctcctagggagagaggaggttggggatgcggggtgactcctgtggactacatctcccagaatgcctcgtatttgccttccagttggacttagccaacgggaggcacccagaagaggttagcagttgggaggaaagatagctcacggtatttcttctcaccgattttccaccctctccctgctttggtgtcatgtactggtcttaggtgctgccctgcatgactccagttgccaccagtcatcccctcctccggagtttccgtttttactggaccacaattttacactgtttttctcctcctccctttagcgttggggtagtaatgacttccgctgttgctggtccccagagcctcaccatcccggtgcattcccacaactctgcctacaccactgtgaatagtctttttatgtacgtgtctgagccttctggggtgaatattaccataccgatgcagtagtcttctagctttcatttcagagtttgactcacagcactttagaaatcatgtaattttttcccagcaagatcactggagtggatgctttgcttttaatatcacgcttactacaagttctagacgaatgctagaaaggttaaattccttgataaagccaggggaagaaaagacactgtctcagagacaagataaaaaggtcctacaagaacagcaagaagttgttcccatgattgatgacattcttgattctaactccttgatgaagagaagggagggagggccaggctctggaagaagagagtgagacagagtgaccccaggtatgcttatttttaaaaggaaaaatcaccctgaaagaagccatgtgcctgccaccacaaatgaacacatgcttacttgtaaatttttacttcagatctttttaaaaagaaataaaacattacagaattaaaatatctcatgtcctcacaccagtcctgttcccctccctccctccccagagcaaccctatgatggtttccatgtgtcccagttcatgtctttatattttcaccacacatgaatgtattgataaacaatatataacatttttccatgtttttaaatttgtttcaaaaaatgtatcatcctatacataatattctgcaacttgcttttattgctcaaaattgtgtattctagatctagctatattgatatatgtagattggctccatgccttctagttgctgtacagtaattcatcatacagacttatttgttttactcatatcctcaattgtgggcattttgtggtttccattttttttttgtttctataagcagtatttataaaacatgtacaggaatttccctaagatataacctagaagaggagagttcagtcatgggtacaagtgtttgcaattttattagatgttaccaaaattgttctctaaaatggtttttcctacctgctgaattcctgtttccctatattttcaccaatactttgtattgttgtgattttctgtttttaccaagctaataatgtgcaattgaatttccttgtttaaaccaaatactctcacttactgttgaggcccagacatcttttcataggtatattggacattcagggttcttctgtgaattgttggcttatagtcttcatttttctattggaatctttgtcctttaaaataatgacttaaagaaattctttatattttttgaatattaatcctttttaatttgttttttacttttccagaagtttataattttaacattttcctttatgatttctgacattactgtcttatctccataccataaaaacattctcttgagcatttaggtccttaagccatctgaagtttatttttaattgtggtgtgaggtagggatctaatgtttttgtttttgttttccacataggaagccaacatacttattgaatggttcagtttgtccactaatttataacgcctcctttatcataaactaagctccattttatggtggatctatttctgagctttccattctgttttactgatctatctgtctattcctgctccacccacccccacctggcttcagctgagactgtcacataaaacccatggctttctatcctgactcccatgtccaacatcagcctccccagttttgccccacacacgtctactagacctatctttccaagagtcatcattgcctaatttattgcatgcccactgtatgctaggcagcatgccaactacacatgcattattcatttgtttgtcactgccctgtaagtcaatgcctattttgccaatccggacatcaaggctcagaaattgagtaactttcccatgtcacacagttagtaaaagacaaagtagagactggaactcaggtctgtctccaaagtgttggtggctctccagtttcattttccagcattctctacctctacaatctgtccatctgtaaaatggggatattcatccctccctctcagggttgttataagaattgtgtgagattagatatgtgaaagcacttagcacaatgcctagcccatagtaagtattcaataatcatcagccaaatttgaataagaagcaggcagcagttgctaaaagttttcttaaaaagtcaaaccttaccccagcccatttatcctggctttagaatcccagcaggagatgagtgagtcagtgggggtgagtgcttagggatagaaataatctttggatcgctcccccttccactcttcttctggttagaggctcccaagagcaacaggaaggccagaatatgggaagctgatgaggataggaaacccttagaaatcatactgagtccctgctgaacctcagaggctgcaggccaactgctgttctgaagttctggacttgcacagcaagcctgtctactgaatggccatcacgacccagatttcacatctccaggtacctggggctggagcggggtttcttcctccctgtttgggctgcctggactaaggctatagccagagtctccttctctttagtgactgccatgtcaacaaggcaactgtagacctccctcagaggaggcaggtgaaagaagacagcctttcggggcaactctctggctaatgggaagcacattgatgaaggaagccgactgacttgaaaaatccagcaccagcatgcaggctgcctttaaggctggaggattatggccacttgcaattttcttgctaattaaagttttcataggaaaagcaaacacatatctacacatgtatgtatgaacttgcacgctgattgtatttcagaagcagtgggctgaatgctttggttgctggctttctttgactccaccactcacatctgcgctgtgtcattgacagctctggccatggccccagggcactctgcaggggtcagaataaacagagaaaaacagcagtggggaggacagcacactctctcccttgtttgacttggaactcctgcctgagtcttgcaagaagcaatatgttgaattttaaaagaggtgaaaactacgtcagttactgagagagaaatctgaaagagctatagcctatcttcctttgctgggatctggcctggggtatggaggcaggtgctcactgccacgggagtcctctggaaactgacttacttggaaagggcaggacttctcgctgaaacagtctctgcagtttctcaaaagtgggtggggatcctgggcccccataacatgtctacatggttaagaagaatgagacatccaaccagcatttaggattgcagagatttgaaggagaagcagttcattataggatcataaaggggcccccgttccttgacatgctaacatgggagcacacaggttcccacacaaacccctaacacatggcaggtgacttgcatatgcacccacacctccatggacatgtccagggttaggttaggtcaaatctagggaatggcagctgcaaccaaacctatgtctcctgcattcacaaaagcgtgtcagaatgaaggtaagttccagtaatgtaacagcaaaggaactcacaattatcatgcttgattgtttgtcacagatgaactgtgatggtgccatcacatctgatggtgccatcttggaggcagcagacctgatttccagccctggtcctggctgtaacttggtgaccttacgtaggccttctcggaacattgagctcttcatctgtgaaagagtgaggttggggctgatggcctcaagggcactggcataactaacattctctaggtcaagctcctattgtactttgcatcactggacatgtctgagatccctggaaatgaggatgtaccagaatttccaactctctcgctattcctgctgggtcctgcaacccttctccagtggaagttttctgctcccttgattgccaaatatcctcttaatctccatcccttccccctaatattctgtcctcaggaaaggatgtgataattgtgtgcccactaagtatcaattactaaagcaggaggaagaattaccttttaacagaatgaagctttgaaccaaaggagtgaagccctaattgcataattgcagctggtgagttgaaggggaaggtatttgggagttaggaccctaattacatagatgcctatcctattgctgaagcctaaaacgctaccattagcaactaagttcttttactattaaggatcttctccccacaaaagcaatgtattaagattcagcagtcatttaaggccttggtaggagggagttttttggatctttttttgtgtatttttaatacgggggttcaggggaggtgagtgtgaaggctgggcagaaggctaggtggtttagcagctggaggatgtaagatgaatgtcctgaaggggaaaaaaacaaagggcaggcctgggattccagaaaataagtttcatgtgccctacaattgtgatgagggtctgccttgcactgggagctcccttgcagggaggaggaggggcccaataaagaaatcagaaggaattctagacatgttagagcagtgcaggcctcagtgataaaacaagaggctctgttgagtcactccatggagacgggaagtacccccacccaaaattttgttcaaatgttaagactgatgacaccacccatgcaccaagagggtattaaaaaggtttattgctcaagtaatgaggttttctagggagagcagggcaagctcccaagcacatctgaaatgtggcttgggctttcatggtgcctatggtgtggggatggggtgagggttcctgcgtgtgggcaaaggtttatgtgttgtgtggcttcaattcctgctagtgctaaaggaaggtgagcccaggcattctcacccacctgcacagatatggggcagaaggggtgggatggatggggcctcacagtcagacatcaaaaatgggattttgatttttttttttttttttttttacaagctgggaagcagcaacagatccagtttgtctctaaggcccatcaagcctctccctaacaccagtagcccccgggaaccctgggcctcccaggtctttaatgtttgttgggtgggggctgaagtgacttcagcattctcaggccagtggaccaggaactttcattcttttaggaactagagaggcctgttaaaaatatatcctaactccacagaccccctgacctctgcagtgtgtgtgtgtgtgtgtgtgtgtgtgtgtgtgtgtgtgtgtatccttagagaacactggctttaacactgatcccaagcttcagagtcttgcataatgaaatgactgggcatcttaatcagaacagactcatcttatgcctgaaaagccgaaatatgctagagaggactgggtggtagctccataggtaaggaccatcatctcccggctactcagcaagtgcacataaacccaaggatgagtaggactaaaaccaagaagacacagtggggtgtcagcacaaatgtgtgccagccttctgagctggactcaggggcccacatcatccaggaatgctgacattacctctcttgttcttggaaccagcttccctttgcataaggttcagagccagataaaatgtaagcttgtctacttagagtcacagttttgaaattgtaaatggtatcaaggagatgaggtcttgggatccaaacaagtcaggttaaatcccatctggatgatctttggttgttttctttacacccgagtctcagtttcctcacctgaaaaatgcagatgctaggaccatacaaaatattgtaaaatgtaggggtattatatgtgaaagactttgcctagagtaggcacttaacacttacactatattttaggaaagagattgggagctctggtaagatctcagaccactggacccaaaatgttcctaggatgttgaaggtcccagaggagcacccaggacagaaaagaaacaaaacttactacattgttacatggttgtttgtgcctgcaggacaagacttgatcttgttattcattgcatccccagggcccagcctaaagccacttgtgtagtaggtgctcaataaacatttgccgaactggtgaagtggtaactggtttatccatccctctgatcccatccagtaaggacgagaaagagaaattaacacatatcaaatacttgctatgtgtacttccctgtacataacataatttcactctcacaacactgagttaagtatttatggtcccattttaacagatgaggaaaaccgaggctccaagagctttgaaataatactcctaaggttaactagctagtgagtgctggagcagggctttcattcgaaagcacatgttctttgtaggctgctggatcgcaagtgcagtaggagaaagcacaagggcggtacatcagaggggagccagcagcaggaatgtcactctgatattttcttcttcaaacattcaactctcctcaaccaaaacacttcccagatgcttccaggacctggcaagtcttcagtcacaaagctagggatagtccccacacctgcaggagaacagaactttagaggctgacccctcaagattatgctttttaacttgtctaagggccactgctggaaccttcgtctcagttgcattgagggctctagggccacatgagacagtacttttaccctataccaagtcctaggacataggacatggtggtgttatggcttgaattgtctctccccaaattgcgtgttgaagtctgaacccctagtaccagtggaaagtgaccttatttggaaatatggtctttgcagatctaatcaagttaagataaagtcatactgagtgggatcagggggaggggggtccttaaaccgaatatgactagtgcccttttaagatgagggaaatgtggacacagacacccacacagggagaacaccatgtgaagacagaggcagaggttggagtaatgcagttgcaaggcatggaatatgaaggattgccagctgccatcagaagctaggcaaaggcaaggaaagagtctcagactctgggtcttagagggaacatggcttgctgacaccttcatttcagacttttagcctccagaactgtgggagaatccatttctgttgctttaagccactcagtttgcagtactttgttaaggaaccctgggaaactaatgcagagggctcttcagggcagcctccaagttccagagccttatgcctcagccatcagctggggaggcccgcagactccaacagccaggacgccacagctccccggcccctccacccactcctgtgagacgacgcagacttcagctccaaacccagctctgcccagtggggttttttgttgttatttttcctaggcttttctacctgaacacccagtggttttttgtttttttttttccccttaactcttggctctgaacatccttcactgacgtgagagataatacaaacagctttctgttaacataagcaccaacatcctcgctactatttatccacttccacattgtaggcagagggtccagaacattggctccgcttcagtctggggaacagaggctctggagactttgtgctgtgcaccaggaggaggcagagcaggataatgagaagagcatgggttgtgaactctaacaattcacagtctagcgctgctcccttccagctgcgtggctttgggaaagcgcttggtctctaagcctggtgtcctcatttacaatgtgagaaaaataacaccatgccctgaggttatgatgagaattgaatgagataatgtgcatgaagtaactgataaatattatcagtcttactctggttataatggttgctattatttcttctttataattaacttccctgaaatggaatttcaccatgaattaaagcactgtaggaggggaaagacagagagagtcagatgaggggaaggaaattcgttgggtctgcccagcctatattgtgattatttgagaacagcccctcccaccagagttggtgctccataaatggcagttattattcttgctttttttgtgattgctgtttatgagtttctgtttttgagccatatcagtgcccttaacatctccttctgtgtccgagccagatgattggatcttttccccaatctctaccctcctgtaacaggattctagatccacattcttttccatgtaaagtgcatttcctcccaccgtgggcagagtgtgctttctacatgacttggtttggccaatgaaatgtcatcagtcatgacatttacttatggtctggcttattctcttacattcctgataatgtctattgaacatgtgtgtgctgggcattgagctaaatgttcttactggatcatcacaactgtgtaaggcaggtactattttcatgccagtttttagattaaaaactgaggcctagagagataattaacttgccccaagtcacactgtaatggacccaggactgaacccaggcagtcagcttgcctgaccatgtcgcttcaccatgctgcctcaccgctggaggaaggtggtagaaattccttctgcccaaagacacaaaaggtaatatctgcttcttttctttccttttttttgtgaatgtcttatataacttatcctgtcatccttatgaccacacaggagttttatagatgaggaaacaggatcagaaaacctaagtggcttgccgaagtcacacaactagtaagtagcagagatgggatttaatctcagattttgaatattggactccaaaacctatattctttccatctttccaccataccacactgtctcctcccattgcatattgctgatttatggaggcctctgtttttctagatctgaaatggaatgatcagtctagaatctaaaatctagatacccacccacaatggagaagtgtgaaaacagtagcattcttgtcgaggcttgatcaagagtttatgtgaagcaaacgtttgtattatatttcagaagcgtgatgaagggaacgttttacaggttttagaaagtgcagaaggttgaggatcagtgaagatcaagcactggaatgaaaaagcatcctgggagaagcatggcagagatgcaggctgtctggtctgaacaactgaggggtgggtacaggtgagctaagctgatctggccatggaaagaggccgtctgtctaagccaacagtccaggtaccaaccactcatatctggtggctttacagaatggaaagccaaggcccaggcattagatagagtgcccgagttcccttccaacccatttattctacaaacattcaccagataagccaggcagtctgaaacattagttcaaatgtgaacattgatttctggcagtagcttagccctgcacatggcagtggactatgtgcactgtgtacctggctaaacactttagtaaatagatccttcctgcctttgggtgcagtcagtcctggagagcaaatgcttcttcctcaggaattttgcatgcagtgtgtgaaaaacatcagctaaaacagatccaaggctgcaactaaaccttctcctagaatttagctctctaccatggatgtgggaagaactcaggatatattaagtaaaataagtactgtgtaaactacatttcatgagaatgcaggagaaaatgaaaataatatccagatttccttgtatatacataaagatactctggaaggatacatgagaagctagaggggctagagaaggttggtaggaatggaataaatggaggtcagggtggcaggaagaccctattacataccttaaatttttttattttcaaaattattaggctgggcatgatggctcacacctgtaatcccagcactttgggaggccaaggtgggaggatcactggagccgaggagttcaaaaatagcctgggcaacatagtgagaccctgtgtctacaaaaaaacaaacaacaaaaaaaaaaactattagccaggcatggtggctcatgcctgtagtccctgctacttgggaggctgagatgggaggattgcctgagcccaggaggttgaggctgcagtgagccattatcatgctactgtactccagcctgagtgagagagcaagaagctgtttccaaaacaaaaaaaaaacaaaaaaaaacaaaaaaaaaaacctattatacttagctagtgcaataagacaagaaaaagaaatggaaggcatacaggttggaaaggaatagataaaactctctgtcttcagagatggcatgaatatctacctagaaaattccaaattatttaaaaactgatcctttcttggagacccttttgtagagtagaattttaacatacagattcatttaatactactataatcaggatactgaactgtttcatcacctgtaaaagccctgctgtgcccttcctttatagtcactgcttccccaggccttaatccctggaaaccactgatctattctccattctaataattttgtcttttcaagaatgtcatgtcaatggaatcatgtactatgtacccttttgcaactttttttttttactcaacatagtatctttgcattcacccaagttgttgcatgtaccaaaagcccattccttttcattactgaaaactcttccattgtatggattatagatgcaacacagatgtccttctttcatctactggaggacatttggtttgttttcaggttgggacaattataaataaaggtacttattatatgatattataaatattcatgtataggtttttgtgtatgcatacatttttatttctctggagtagatacacaggggtggggttattgggatgtaagtatatgtttaacttcatgaaaaactgtgaaacaacttttcactggggctatcccattttgcattcccaccagcaatgtatgagcattttagttgttccatatccttgtcagcacttggtgctatcagtatatatttctagagacattctaacaggggttgtagtggtatcttgtagtggttttaatttgtatttccctaatggctaattttatcaagcatctttacatgtgtgtatttgtcatttttatttccactttggtgaaatgtctgttaatgtcttttgcccattttaaaactgggttgtttgctgtcttactgttgagttttgagaattccttctatattctggatacaagtcctttgtcagatgcgtgatttgcaaatattttctcctagtctgtagtttggctttttgttctcttagctgtgtctgtctcagagcacaagttttcaattttgatgaagtccaactcatcatttataaaaaagattatattttaataccatgtctaagggctcattgccaaacccaaggtcgcatagattttttcctatgtttccttctcaaaattttttagtttatgcattgcatttagatttatgttctgagttaatttttgcttaagggctgatgtttagatggagattcagcttttgcatatagatatccaattgttccatctactctaaagggaagagaatgtacgttacttaacttccctcccagtacaaagatatttagagttcaatggaaaacgtatgtttataacttaagagtgaaatatctcttaaaaaatatccaacatccaattgcttgcaattaacttgggtgagagtgtatgatttgtgaggaatagatgtaaccggtagccaggaacctgggttaaatgtctcataacaccatgttttataacatatgactcaatgatcttcaacctattttgcttgttgattccttaactttgaaaaataaacttttaccattgacatcttttccttctttcttttgccagtctcaccacactgggctctttggtgttccttgaacatgctgggcacgttccttccctctttcagggccttgcattacctggaagactcttcttccagatatctgctaatgctgtcattttagacatcaacttctcagtgaggcctagcctagccatgttaatgaacacagcaatcaattccccttaaccttatctaccttccctcccagcacctctcatccaataaggtgatatgatactcaccagcacccatttaaaaaatgcatcaacattgctatttgttaggagtcagaatcttatattaattctttttccccttgattttatatttgaatttcacttcttcggcagaatttaaattttatgtaatttattttatgcatggaagtttttatattaactctgtaatatttatttgcagccaaatagaaatttcaatacattatttttaggaaccataaagttccaaatgttaaacattttcttctgaattgaattattgaattattattataatattaatagtaaatgtctaattaaagacaaatatattataaattttcataataattatactaaaaacattcattgaaaatataagaaaaaaaaacctcatgcacaacttctgtgtcctgttaaaccatccagcactgtgagcactggaaaaagtaatttggggcacttccctcttatgggccaataggtttaaaggcccacacccaactctgccatcctgagagctgcttcttgctttctcaggctggggcagttccagcctcttggtggtaatcagcagggacatggacaaggtgtgagtctcagggacttccagcctcagccactcccctgtagtcgaggctttgcagaatgtggatactgcaggcctcagggagggaaacgtgtttctttagcagctagtaaggttgaagctccactgctctctcctgcctcttgtggggaagccgtgaatgcagggacataagagtagaggctctgcccctacctgccaggtgcccagttgacttcaagaggtgtctccagcagtgccacatacagtcatatctccttcagatccagaggagagaggaggaaaagaagcaagacagcttcagagagaacacgggtttaagaatgagttgtgtttcactgaactcatttaggaaacaatggatttagatggcaagaggttacgggggaaccgaggaactgaccccacagccccattcacatccagctaagacatcaccctgaggtctgttcctttgcaagcatccacctttctctacagtcaagagctgaacaaagacctccagcacttggcttcttgaagagttactttgtcacctttttaaatgcctcagaacactctacttgcctctctttctactagctttatcctatacgtttcaggatcaatgtcattcggtggttaagacttaggtctcagagtcacacagatctgggcttatactgtaactgtgctgcttactgtctgtgtgacttgggcaaattatttacatttcctaagctttgatttcctcatctctaggatggataaaagaatagtatttggattgtgagtatatgaggaatgtgtgcaaagcacttaacatactgcctgatacacagtgtgaatacgtgtgaataaatgatagctgtttttatcaacctcctctccgccttctcttcctccccgcttccttatcatcatcatgattattattaatttcaggctccagtcccttctctggctgctttcatattggaagggcccaggatgcaaacaccactgatccagcatcacctgcaaatatctgtcctgcctacaaaacacaactctccacatggcccctccctcatcatgaagcatctcttcaccagatgggctttggcctccttgatccccatgggccttttgcaatcctttcaaagctcagaaataattaatagtatgaaaaccccactgagaaccctgtggtgtttggggtggggaggaagctagggcagacccagggtcccaggaagttccaagccttggctgctggaggcaccaaggatcccaggtctgtgggttcacttgatgtcggtctcagataatctgcttctcacctagctcagatgggggttaggggaagcatggtttgggtaagccaagcaattcaagggttaatacctaagaggtctccagaatcattaaaggctctgaattctcagtggctgaaaagctcctgcaaggaaaaataaccttcgtgaaaatatgttaaactcaaaagttgatttattatactcccaacaacggactgatctgtttgcttaagtgccctaagtatagcagctaaagttcacaagcactatttgacctttacagaataattagcttaaaacaattattagcacgtttcttttcaggctctgtagtattagataatgcaatcactccactcaaaaactttgttctttattgttacttcaaatcagccaaatgttgcagaaacctacaccaggctcacagattgctcccacactgtgctgaccatcttggtttgcaatgacctgtggtgcagcttggaatcctccccaaccccactccttcttcaagtgctcagggactagaggaccggacacagcagatccagaagtcacaggtgcagggtcacccacagcacactctcctccccaggataatcagacccttgagatctttcattcttaaaacaaaattattataaaaggcaacatgtgttcattgtagaaaattggaaatacacagaaaagcaaaatagaactaccatatgatccagcaatcccacttctgggtatttatccaaaagaattgaaatcgggatcttgaagagatgctagaactcccatgttcattgcagcactatccacaatagcaaagatatggaaacaacacagatgtccgtaaacagaggaatggatgaagaaaatgtggtaattacatacaatgtaatattgtttagccttaataaaggaggaaatttcacaatatgggacaacatggatgaatcttgaggacaccatgctaagagaaacaaacaaatcaaagaatgacaaatactgtgtgattccactttatgaggtatctaaaatagtcaaattcatagagtcaaaaaatggtggttacctgaagctgggtagggttagggggtggtgcagatgtggagttactaattaacaggtgtaagttttcagttaagcaaggtgaatacgctctacgttcctctgtacccacagtcaacaataatgtattgtacacttattacggggatagaaatcatgttaagtgttcttaccacaataaaataaattttaaaaaggaaaagcaaaaaatagaaaatacagctcacaatcttattacccagagataaccaccgataacactttgatgtcatctacttacctttttataaacttttaaaaaatcctctattgtaggacactcaagtgatgttcagcgtcctgttaagcaattctttgctgaaactaacattttttctcacatctattattaccttagaatagatgttatttcgaggaatgctatttctgagtcagagtctgcacattttaaaaactttgtattcaagttggcctccagaaaaatcctatttactcttctttcagcaatgtatggattacctgttttcctcagaccctcactagtaccagaaattgtaactttttaaaaaggtgatagtttaatccatgaaaaatttgcatttctttgattattagaaaagttgagcatgctttcatgggattttgggtcctttgcatttcttcatttgtaaattacctgtttatgtctgttgttcatgttctcattgggtattctttatcattttcttgtaggttatcttataacaagaaagtcaatcttctttctatcacataagttccaaatacttccctcaggttgttgtgtttattttattttaattaattaatttctctctctccttttttttttttttttttttttttttgagatagtttcactcctttttcccaggctggagtgcaatggcgcaatctcggctcactgcaacctccacctcccaggttcaagtgattctcttgcctaagcctcctgagtagctaggactacagatgcccaccaccatgtccggctaatttttgtatttttagtagagacggggtttcaccacgttggccaggctggtctcaaactcctgacctcaggtgatccacctgcctcagcctcccaaagtgctgggattacaggtgtgagccaccacatgtggtctattgtgtgtattttaattttaccattttgttgacccacatttttactccaggggccctgagatctgcatttccaccctgtgatggggctcctaccacttctttcaatcttaactgtagattcacttcactgatcatttaattgatagctctggatcaatttccttttccatatttaatccgggcattaaacagacatacgtgactcatttgccaggtgcaggcacttgggttaggggatagagcagattaattctagtccgcaatgtctcctgtgaggttcgggagaaaaagcctggtgggaaaccacagggttgggagtcagttcttagggaatggctacagctctgtgctgggcattttgtctattgtccgtcacttaactctcacaccttttgaggtaggtgttactgtccccattttacagatgagtacatggaggctaaaaaagtttcactcacttaacctaaagtcaaccagttgttaagcagcagaataggatccagcccagtgctccctgccctctacccaggctctggggatggtgcttgcagcaaacttgaggccaatgaaggtgaatgaggtggtcatgtagatacatggctggatcctacctttatttcaaagtttgatattttgtacatcatagatttttccattcattttgctttttaaaattaaattgcattaaaatattatttatcttgagtgttgagttttttgtcacctccccccacttaaattttgtgcccaagagattgttttatttacctcactctaaaggggaaggacctccatccttttcaaagaaaaatagttggggacctaggaggtggtgggctggggagctgagtgcagactggggcaggagccctgggtggagacacactgccacggtgacccttcctggctctgtgcagcaggctggccttctgcgtctcttgttttatcagcagcagatatgcttctccctgcctgagaagcaggcctggaaagtgaacctggtgctccatttgcctatttttggagttctttagaagaaaggtcttccacacaaatgcacatgattttgacgtttgctgatgagcagcattctaaattatcgcagtgtacataacattttgtttaaaaggcacacttccttcccagcccagggtcccagaaggcagaggaggtcagaggagacattcccagccccagggtggtgagagaaaaagccttccttgttctctcaggctgtctcctccagcccagaaacaagtcttgccaggggtggtctgtgttctaagattggaggcggggggagcctgcttttttagctctcagacttgagagacctgcccgggctgctccatgaggtggggtctgcctggtatccccacattctaaccagattccccatctgaaatactcccactcccctgcctggaaagcggcctgacagctcatcacattcctgcctgcaccgtccactccagcggccacatgactgaggggaaaaggcaagaaacccgattcctgaaactgggcccaactgatacggccggttcctggaatcccagcaaagaggcggccggctggggtggggaccagccttcccagggcttgggctccgtcctgcatggcagcgtttcaaagtccaggcaggccgcagctgggccgcctgcctcccacagaagaggaaagaaatccaggccccaaggtcccctccttactctgggaaccttctctgtgccacagcgtgagggctctgcctgctcctagcctccccctaacagagcccattctgccttggctcacaggtgcctgtgttcttacttgcttcgaagggttagaatcttgtcagcagggagtttgtctcattcatccttaacagcaataactgccatttgctgagcaatttctacttgtcttctgtgctccttgtcctgggagataggcaattcttttcattgtcattctacagatagggaggcaagcttcaagaggtcaaataacttgcccaaagtcgccagtaggtggccaagtcaagatttgagcctgtgttttatgaaagcccatgcattgaatcctcaagccaggcatttcagacatcagggctcacaggtgtcagactagatgtataaatgagagacatggaacaggcaggatctattatagaatagcaggtgcatgtctgtctgagggagcagctgctccaaccttcgagctgattttgcctcttgtgaatactggctcaccgtggccaaatggattttttaagaatagcctgagatccacatttctaggtgaaacgtcctgattttaaaatttgggtaactagttaaaagtaaaagcaaagcaaagcaaaacaaaacaaacactatgtgggctaaacaacagaagtcactgggtcagatatagcccataagccagcagtttaaaaattctgtaccacgtagttgtaccatgttgtgctctgtgcatattaggtgtgtagtgaatgttttttgctttaaagtaaaaccaaccttacttctaggaacatctgtatctacaggaggaaaaacgtacagtctcagatattcccaaggatgtacaattttgaatgatcagtgcagatgttgccttccagggcaacagatggtcatcaaatgcacatatagaccaggctagtgtattaatgagatgctctaagatggattctcctcccacatatccaggtgagaccacatcgttagaagaaagacacattcacatgtggcttggcccagcaaatgaggcaggagaatagagatttagggtaaccaagggttaaggcataagcaaaagaacagcaggtgcagccagttctaggcaagattaggcaccatacaggccacatcctcactcatgtgataataagacgtttccactttggcctctgattggctgtgagccaagtctccactacctctggtcacaggccaatccttcataaggtgtaaccaactggaggcttctaaaggacacctaggggtgtaaccaaattcttttagcctaataaaaaccctaaagaccattgcaataggggctcttgagctgcttgtcccagcctgcttccactttgtggagtgtgctttcttactccattcttttgttgctttgtctttcattgcttcgttctttcgttgatttgtttctgcgttttgttcaattatttattcaactctttgtttaacactccaagaacctggacaactcactgtcaagaccttccatccagtaatacaaagacttggcctctgtgaaccatcctctttttcttcctacctcctacatggggaagtttccaaggctcagtcctgaaacttcagcaactctctctgtctcatcttccagaaagaagggatctcaggccctttcatggatttgatgatcacctctacacctcacccaagcctaaagccaagttctcaatcttcctcccagaatcagggtgcccaccctcctgctggccccatgtctgccacttgcactatcattcttctgcttgggcagctccagatcccagcatcattcttgaatcctttctgctttcctccttcaataatcagccccaaaccctagccaatatctcattccacctctcatcacgtcatacctgggccattgctatatgctcttaactggtgtaaccgggataacatttggaaattagctgagtccctcctccacattcctttctttcaccttatggccctcccacacagcaggcatccatccattgcttcaagggagggttgttaaaggcagtcaagttcttggtttttgaatttcaaaagccagtcatcagttttcatcataccccttttccccaggagagaaatatttcccaagctgggcactggggaaggtgtaaaaggtttgatgggtccccgagaagaaaccctgttgtgccttcctcccacacctgggctgagccctagatagatttggagggtgggtggcagaggggtttgagtgggggtcggggggaggtcgtgcaattcaaagcaaaggaaacaagtcccattttctgtgaaggaactcagcacagcccaagagctgagcagtagaaatggctacatggggtgtccgggaaataagactttaaatgtcctcccagagtctcctctggtccctaagtggtgacagagaacagccagatgtccttaagttcacgagaaaggcctgaaagaactaagggccaaccgaagaaagaccccggatgaaagtggaagccacacacagctgcaacctccttgcctcaatgactgaggacctccaggaaggagggcgtctcagctggtgcctgaatgggcaaatgatgaccaggaacctgactccccttcgcagtgcccccgtccgtcactgtagccctgctccaagagcctggaattcagacacaacttcagtgggcggggggagatgcagcaaaatctgaacagacagagattaaatgtgtgccccccacaccctgaaaaagagaaaatatttaggaattgtagaaaaatcaagtcactatttttatggcctgagtttgggtcctgaaattcaccagcgctccttgcctcttctccccgtattccaaatgattgtgtattctgtggctggattaatcttcttccagtgccacttcatgctttcatgggttcagagaataattattgaacagttgcaatgagccaagagatgtgttaggggattaaaactttaaattgagagtaataagaaagacgaaaaatagcattacaccaaaatgccatttttcaagcaaagctctgaaagtttgacaatatactctgttaggtaggcagtggggaagcaggcactcagtatattgcaattggaaatggaaaatattacaacccctatagaaagaaatttatcgatacctactaaaatgatatatatatttgccatttgaacaagtccatctacttgcaagaatctataccaaagaaatattgacaaaagtatgaagggatatgtgcacaagacaattaattgcagcactagttataatagcaaagaattgaaagcaacccaaatgcctatcagtaggaaactggttgagtaaatgatggagtttattattactgaaatacataatagattactatgcagctataaaaaggaatgagaaatatttctatataccactatgaagtgattttaagaacatactattaaaagtggggaaaggcagagaatactgtttatagggaagtattttacctgagaaaggtgagattattagattatatatacatattggttatatattttttaaacgcaggataacaaaaactaatagtggttatatataaaggaagtaggaaataaaacagaaaagccagggatgcaagcaagacttccctcaatgtaccttgttttatagacttttaccttaaaactatgtaaatgccagcgggcatggtggcttacgtctgtaatcccagcactttgggaggccacagtgggtatatcacctgaggtcaggagttgaagaccggcctggcaaacatggtgaaaccccgtctctactaaaaatacaaaaattaaccaggtgtggtggtgcgcaaggctgaggcagaagaattgcacgaaccccggaggtggaggttactgtgagccgagattgtaccactgcactgcagcctggggaacagggcgagaccctgtctcaaaaacgaacaaacaaacaaaaaatatgtaaatgctttacataattataaaacaaaaattaattaggaaaatgcaattcttaaaaatggaaaataaataaaacaagcctaactgtgtatcaatttggtgacttacttacatagggaatagttatttcaagtgactttaaaatacagtaatttgattatataaccctagtaagatatgacataaagattaaaaaaaatcttgcatagaaatacaaagcggttttttcagttacattgttaataataatgtttctattgttattctaaaatatatgtgtagtagaacaaagcacataagttattcactttaggaccaaggattttcagaataagagaaaatagatacaaatataaagtcacagaagctaagtaaaagccacgtcattttaaacttgaattggaaacctaagcatgagtccatgatgtattttctctttaaaataaaaagtatttcccttctctgattaaaagacctagagacactgggcgtggtggcttacgcctgtaaccccagcacttcgggagaccaaggcaggcagatcacctgaggtcgggagttggagaccagcctgaccaacatggagaaaccccgtctctactaaaaatacaaaattagccaggcatgatggtgcatgcctgtaatcccagctactcaggaggctgaggcaggagaatcgcttgaacctgggaggcagaggttgtggagattgtgccattgcactccagcctgggcaacaagagcgaaactccatgtcaaataaaaataaataaataaaagacctagagacaacaacctacctagtaacggtgagcaccccagggcccagattgttgtctctaaatactacttcccagaaaaagaaaccagagctctttgtaaaatgcccttttttttttttttttgtcagatacggagcaggaatattcaaggtaagtctggaaaccaagaaagatagcaaagactatggcaatcacaacaaaatgacccagaaactacctgaaggggttcccattgatcaaaatgggacaatttgagcactgaaatgaacagtaattgcaatgcattgaaacatatcaaaaatattaaaatacctgagtctataataataataaaacaaactaatcagttacctttggaatatgctagataactacttcagtattctgaaaacttacaaataaagggaaagaagcatctattttaccttttcaggtagccaaatagttgatgtgcaaatggtctttatgggagaattctagcctataaatgaagaaagaatgatagaattagactgtcatcatattgtagcccccactgttataatggaactaggcaatgatatcaatggctgctaaaacccttaggtgaataactgatgggagacttcataatgaatggatcatgctgacaatacttgaacccaatgatcaatgttaagatgatgaaaagagagatgaccaaacattgcatgtcttctaatgcgatgtatttggcagcacacaccaccacttatgaagtattcttctaaaaatgaacctgaatctaatcaagccccaagatctaatcatggtttccaggaaatacaagagataaaagaatatgtaattgatactattgggatgaagtctgtaaaatccagaatatttcaaataacttgcaagaaaaaaggggaagggaatctagaaattttaaaagcaacttggaggacttaccaactaaattcaatttgtgaaccttgtttggatcttgagtcaaacgtcaaaaaattttaaaagactagataatttgctgattgactagttgacaatattaagaaattgttgtcaaatattagctgatgtcctttgccattataatgaaaaatttactttctgacctgacattcaacatctttcacttgaacaaaaacatctgatttaagttctagatctgccacttacattactgagaaagtcattgaatggctcagaaccatctgtgaagtgggaacatcataatataccaccttgttaagtcattgtgaaaatatgagatgatgaatatgagagcactttataaaccatataagccacctcccatgactgagctccatgattctctcaagcatggctgattgtctgcctttgttcaagtgatttccccttactcagaatattctcctctctcttgtcatcctatggatgtctcacctttccttttacctccagcctgtttcaccttctccatgaaaacattttgaatcacttcagcccacagcaattttttcccttttcttttcatagcccatattgtctgtaatgctcacttggcactccgaaatgacatttctgggtaaattctcttcccaactaaactgaaggactctcgacaacagggactctctgttctttatcaattctcccctccaccagaagtctagcacaatgcttaattacaagatagctaaagcttcaaataaaaaattattcagaactcttaacagtcacgaaaacacaactcagtgtagcttaactgaagacaaattaacaagttcacataatcaaattacaggaagggcatgggtggtgctagccctgaaggatgactgctaccagggattggggtgcaggactggctgtcatctcattccctatgactgcatgcagacaaacctttccatgtgacagcaagcatacctgtggacagcttcctgtcacatatctccctgcttagttccaattcaagagtcctagagaactctgattggtctggcttgatctagtggccacccctagaccaaccaccaaagccaggaagtgagatgaagcttctatttggattatgtgttagagacaggaagaggaattgttgcctccccaaatgagccaaagccaccagaaggagggagaagaaccggacagctaaactatgaagtgtccatgagatgggatgcgactgagcagaggagggatgtgatttgacatgatctcactttctgcatgagcccccctttccccacagcactgagttttagaactgcggttaacatgtgcccttggagtaccctcagggctgatgtaaaattggccaaaattggaatacctttgcattttcaataaactgtttccagtcatttaccatttctgttgcttttcctccattctcagtgttccaagttttcatctggtataatttttcatctgtctgaagaacttccttagcaattctttttgagcatgtccactggcaacaaattctcttagttttctttattctgattcacagaatgtttttattttaaccttcattcctgaagcatattttcattggatatagaattctggaatgacagttcttttctttcagcacttgaaaaatgttgtgccactttgtttttgcctccagggtttctgatgagaagtcctcaagcattggaattataccactataagtagtatgttgtttttctctaattattttcaagattctctctgtctttagtttttagccatttgattatgaagtggctgggtatggatttctttgggctgattctgtttgggattcattcaatttcttgaatctgtaggtttatgtctttcaccaaatttgataatttttcaggcattatttcttcaagtttttttttgttttttgtttttttccagcaatgcactttgtctccttcctttctgggtctctgatgacttaaatgtcagactttttggtgctgtgtgataggtctctaaatctgtattcactatgggttttttctctgttttttagattaggtcatggttatttatttatctttaagttcattgactctttcctctgtcactcagttttgctagtgagtccatcccatgtgttttattttggttatgattacatttctacattctaaaatttccattttgttctctttatattttctatttccttgttaagaccttctattctttctattcatgtgaagcaaattcacccttacttttggattatttttattatagctgctctgaactctttgtcagataattctaactctgtgtcatctaagcattggcatccgttgactgctttttcccatgcaagttgagatttgtctgtttttttatgtgccaagtaattttgaattgtatcctggacattttgattattagactatgagactttgtgtcttgcttaaattctatgaaggatgttgctatttttgtcttagcaggcaatgaacctggttaagctcaggcctcactttccaacctgccttctgtgggctgtagttccagtgtcaattctgttttcaaattcaaagtctttgcagtgccattcagttctgcccctaggttcttcccctagtgtttagtctgggacctgggcaatggtctatctgttagtgtttctctgctgttggggatcagatccacacatgtgcagctcagggatgagacatgcagctcataaacacctttatgcggtcacttcccatgagtctccttctccacgatctctctgttacttgtccactccttggggctcccctttgcagttctctggtcagaaagctgggctttggtcaccctactctgctgtgcacctcccacaactgtacccaccttcaagtccaagctggagggaaaaagtaaactcaccaccagtttaatggtacaccaaatttgtgcctttttctccaatctgcctattactatttgctcttgagcgtccttgcatagcatctcgtgcagtctttccaggtttttagctgcatttcactgggagagacagggtagagtgtgcttactccatcttaactagaaccgggacacaatagaatggttttagaggacattcttcaatatgtgcctctgaagatgtgcctaaagactcatcttagaactcaaagtcaggtaaaggtagtttcctgatgaatttctacagatttattttatgaaactgatagttccccctttttatcccagttactgaaaaactcagaaaacatgatttagttcacacaatctaattgcagtgtctgacacataggaagtgcttagtaaacattagtcatctccatacctgtctatctctcctcttatcccccaagaactaaatgttatactcaataaaagaaatctttctgagtctgtttttttaaaaaaatataatttgactcttcccacgccttttattacttgactttctcttgcagttctgtgatagtcgtttggggacttattttcatcctattaatcttttacactgcctcaaattgtttggaagtagtcaaggcataaatgaacaaatagatgacaaaaatactgtattcatggaatgcttcctatttctaaaactgcttctacacctctttccatatttcatcctaaacaataccccatattagtgaggaagaaaggtagcatgaggctcctcatcagaaaagcccagcccaggcagcactgacttggggatcctctgggctcccctcccaccgaaaccgagatgaattgttcccatttttatcttctgttgaatgttataccaagatgaaaagaagttttgagaatttcagtgtcctctgggaccccatgccctaggaactctcagtctaggacattcccagcaggccctctcttctcagactgccccatcagtggctaatgcctgcccttggggtccagggatccctagagaaactggaggcctgatgtcacttgaggaaacatgatactggtttctactccttccaatatgacttggaattaggactcatctcctgagtagggtcatcttgtccacttgaggggggctttccacttcttctcctgtccatgaagccaagtacctcttcatgggttggcactgaaaggtaggcacagaaaccacttcagctggcacacagaaaaacatcactatgacccttgcctgttattcagctgtatcctggatccccccttcagttcagaaagggaggcagaacctagcactcagatgggcctctcttcttccctccctctctcgcttagtgacactcaggagacaaagattgcagccatttctctctgagggggagtccacccaagggcaacttacttgcctctgacagttctaggaagtgacactaatatgcaggaggctaggaaggagagagcactcaggaggcttcttgaaaggtcccttgcccccttcccaggtcaactttagcagccacacattcctggggcttagttgaacttggactaagctcactgcctggtactggcatgtctgaacatggtcaaggtctacagaccagtaccagagtcagggatgactctgagtgaccctgggcctgtcactccaatgtcctcagcccaattcctatggatcgccacctcaattccaaggagaggctctggaagggtacagatatggcaatagtccttcactccttcttgtgtccataccctttgcaatgtgactttatagctcctcccatcaagaggtggactcctcatctccttgattttgggctggtcctgtaactttcagtgtaataaggccaatagaatcaatacaagtgatgtttgccagttctgagcccaggccttaagaggcctcacacacttctgccctttgcttgggattcctgccccaaccacctgaacaagcctgagctagtctgctagaggataagaggacttttattaccagctctggctccctagtctactggaggataagagacctttatatcctcttatcctccagtaggctggggaaccagagctggttggcccagttacctcccaacagagaccccaggcaggtgaaagaatccagtcaaggtcagcaaagttgacccatggctggccacagatacaagaggaagcccatctaattccagcctgaattgtcaacctacagaatcataagcaaaataaatgcttattgttttaagccactgaattctggagtcatttcttttatagcactaactagccactgtagaggctgaagcactaagagagctatttgtctaccatttcttgggatattggagtacaaggctttagtggtaccagtcagtcaatggatagagacaggaagggatgggggtggagtgagcagcaggataagattgtgtcttgggagatgttgctgtagtctcagaactctcaagtagtgggaggagccaaagcaggaagagaatgtagcaaacaggagcccagagaagtggctagagaagcatgcttaaaaccatctcagggacttccagaaatatttaggagaaagatgaaaggctagaggtcttatggagacaatgtggttggagccagaaagactatgtaattttaacattacatccaaggctactctgattgaacttttttttttaaactcaaacgagagattgtaactttccaaaagacattagaaataggaagttttcagccaggcacagtggctcacacttgtcatcccagcacttttggaggccaaggcaggaggatcccgtaagttcaggaatttgagaccagcttgggcaacacagcaagaccccatctctagaaaaaaacaaaataaaataaaacagaaatagaaagtttcagcagatttgttacacatgaattcttccaaatagtgaaaaaaatattggtagattgtgtttactttattcatcctcaaaggattctttatttccaattctttggggataagaagaataaaaattgagaaatgactgcaaagactagcagcatttatcacatattctttgtacacatgaagaaagtgaagagcacaccaacaaatactaagttactgtggcaaagaaagaagtctggtgcttacttatattgggttctcttctccttccaggcaagtgtgaagattacacatctctgctcactccccttgccacagagagaagaaacatgactagtggagtcaatgcggcagtgagcagcagggatcctgtcatttctgagctgaagcatttcaatgtttgtttagaaccctccaccattctcgcctgccacatggactgaggaggctttgtgttccagatggcaaagccacagggtggtggtgtctctgtctgtgtggatcgctgagccaggccatgaagtgaagctgccttagaagttacccaggcctgcagcaggtattgcacaaatatgaaatctatttcaattgtgtcagacttctgggatcttggcattgcttgttactgaagcattgcctgacctagtctgactaatacagtattgaaaagctggcatctgattaaaaaaaaaaactatcaatgttgcaaatacattacaaaaacgaggaaaaattattgtgctattgttcactgcagattttacatggtttaatttttggcaagcaagatctagtgttcagaggagcatccaaaaaactttgtgagcatgcacatgataatggaaattttatccatttggcagaagccacagccaaatttgataatattatggcagaatgtttctgcataacataaatgttgacactaaataatattgcacctatttggagaatgaaatacaaaactaattaaaattgtagcagatgcagtgagtgaaatagtctgaataaggtaaaaagagctaactattattcattattttggctacaaccttgatgtgtttgagacacaatccctgacagatatagaacagataacttttttgttgttgttggatttgtggattctcaaaatgcaaatatttctatatgcaaacatattggggatttttttctccagcaaatgtcacaactggggaaggattacaaacaatgttagtaaaccacctacaaaaccaatcaagaataaaataatttgaagtgccttgaatatcacaatgttgcaaatatgcatggaaaacaggacagaatgaaacagatgattctaagagatgattctagggcattttctctttcttgactagatattttaatcttagtggtgaatggtgcaggaaaaatctcttctgacaccactgaatttttttgtaccatccagatctatacaactgcctttcagcttcagtgaaatgttgtgtattaaaaacacatttaccaaacataaatttgaaacactgtcaaatgcatgatgggagagttgagtttatgccattatggcactaaaaactcaattagagactctatccaattcttctttagaaaattttgatatattaataaagacaaggattataaaattcaagccaaaggtaagctttcaaaaacatccgctgttaagtttatttgctcaggactcatttgggaagatgttttacataaaattaatgctatgtatatccaaaataatacaggagctgaaattcaacatattgccctaagaagcatccaaagcaattgtgtatctgcagatgcttattgtgtctactgggagatggggtgagagtggaggcttttcttcctgttgaaagaagaaagaaggttgttggcatctggactcatggtaagaggggtggttgacgccatggcttgggaggaggcagtctgccctgcagcatggtaggcaggagaccagccaggagtggtccctggtgaagggcctctgccattgagatcctggaattttcatgtctgatggccagtggccagtgatcttttctgcatggatgttctgccaatccaggccttcaataaaactttgtcaaactccacagcctctacttaggtccagactcaaactcccactccctgggaggcagtgactgggtggcaagacagaatgagagatgcagtgagaacatctggctgaagtgacaagcagccacgctgactgctggtgtgcagttctgatgacaaccaaggcaacttcacacatgactgcacaaagttaatttaacatgtttgactctgccatttcatcctagtaccatagataagattttttgagtaattactatgtaccaggccctattctaagttctttgtgaatattaattagtttaatccttgaagccacctcactattgtgtccattttatagataaggaaactaaggcccaaggaggttacactaattaccgaaggtcaaattaatgacagagtctggctccagagtccacacttttaaccagagtgcaacagaatctgaacgttacccttataaccaaacagttcacagtagtgttctgagttttactcctagaaagaaaacacacacacacagtcccccatccctctgtccgacagataaatccaaaacctgctgccagcttacaattagcttgaaactgcttctggaccaagtgtggtggctcatgcgtgtaatcccagcactttgggaggccaaggtgggaggattgtttgaatccaggagttcaaaactagcctgggcaacacggtgaaatcctgtctctacaaaaattacaaaaattagctgggtgagggggcggatagcaggtgcttgtggtcccagctacttgaaaggctgaggtgggaggatcacttgagcccaggaggtcaaggctgcagtgagccgtgatcatgacactgcactccagcctgggcaacagagtgagaccttgtctcaaaaaagacaagaaagaaaaggaaataaaaagaaaagaactgcttcagattatcaaggtttcaggaatgctgatgtccagcctcagaaactgcttctgcttgtttgtctctgatatgggttggctctgtgtccccacccaaatctcatgttgaattgtaatccccacttgttgaaggaggaacctggaggaagatgattggatcatggaagcggtttctcccatgctgttctcatgatagtgagtgagctctcacaagatctgatggtttaaaagtgtgtggcagttgcccgcttgttctctgtctctcctgctccaccatggtaagacgtgccaccttcccctccaccttctaccatgattgaaagtttcctgaggcctcctaaccattcttcctgcacagcctgtggaactgtgagtcaattaaacctcttttcttcataaataacccagtctcatgtagttctttatagctgtgtgagaatggactaatatagcctaccaagcaagctgtgggcttccctatctcttagtgtgggctaagagcatgtcaatgccccacattggcaggaaaacctgctgccacccctcagcagagagcgaagggcatcacgtgtctgggaaactgagcaggaaaactttcactcttacagtggttggggtggatggggaatctttgtttccagacccgaggccatgcagcagctacttgggaaggaaagagtgaccctcccattcctacccaaagctttggatgcatcttagggcatgacttaccaaagttaaggaacatcaaaattatggtgaccaacttctcctagtttcccacaactttcccctttttcgctgtgaaagccccacatcctgggaacccctcagtcccgagcaaactggaacagtgggcatcatgatcaaagatgaaatcaaggaaaaccctttccaccctagccttaaatatggaaggccaaaacccccaattctcccatcccatggaagccaggagatcccaaaccctcaccatcagactacaggctgtgcctcgccgctcttagtcctaggggacttgacatctcctcagtgcactgagatgaggcattgaggacacagacctcacattccatctgcatgctcccatctcccccgaggctgccaaaaattggacactgggagatggagatgcttggcagctggagtcactcccagcctcgggcaaattttccaggcttttacatctttggagaagatggtaatattccctgtttcttccagatccacaccgcctagggtcagagatgcagggagctggccaaaacgcctttctctgtgataaagaggccacagcgttaaatcccgtgagttcatcaacaggtaacaaaatattttgcatgatttggccttgactgaaaggaaactgtgaaatcttcaaggtgctctctgtccctagtgtggactctccaaagaggtcctggtccccagcatggctacagacgttcactgcatgtaatccagacctcgtctaatgctataagcaaataaactgaatattcaaagagaacaaatcaccagtccatcaaaatccttggggtaaattagttcagcagactggactagagacatactccgtgactcacccccacccagagtaaataagggaagattaagcaaaacttgattgaatcatgctgaagtttggcataactcaacaaacagatcagcctgaaatctcacattaggaacacataatctcataaaatttatgactgttattgctcaccacatatgtttctgggttactgtgtgccgggctacaagcgagcttcattgctggggtcttgagggggctgcctgctgatccataacgtatttcaagaaagaagacacattcccggttgacgctctttggcatgagtttccacgtggcctggccacggcagggaaggagactggaggggagatattgacagtgggaagggggttttgtgccatgccccaagcgggccccttggcaaagtcttgttgagatgctgaagggaagactggcaaacaaagcttttctatctctcttagcctcagtttccttatttgcaaaataagaggtaaaattagacgatctctgaggtcttttcaagaagatcaaaggggtgattcatctaaagataattcacctaaagagaatgaattgccgatctactgccctccatctccaaaaggaagccagagcaagaactggccactatgtcaccaactgagagcagtagagaatggggtgtggcttacaggaggccatggaatgccagccctgagatctgggaggaaaggagagatgaccacgtgcttcgggagggtcaccctctattgctgcccagaaataaaacagagttcagaagtgtttgcaaacttgtatcaccactccaccttccactgcccattgatcgaggcccttttcccctctgatcccaaatgcaacctcatgatccttcttgatagaagctgctacccacgcatcagatcccggtggtgagcaagagctgctttccaacccaaatgacactcaggctccctccagacccatgctcagggattccaggtctgactgtagagatgcaagaatgcagagtcagagtcagtgacaagccagagcccccagagggggagccagttccttgaagtgaagggccatcgtttgcaggagatggttactgaagtccaagtccagggattccataatgaaaggaagagcaagcccgtgagccctggactcatttattgaagcccagagcaaggcaacagattcccaggccccaaggctgtgcccccaggtgtcaccacgagggaacacacatgtagcaaaggcaggtgacatgtagacacagcaggcgcctgccgtactgaggtttgtccctccctgcacccatcccgggctctgtcctgaacgtctcagctcagcaatctctctcacgcagatccctgccttccctgccaacagccaaggtctgacccttctgaccctcgggccctcttccaggcttctcctgttccatttccagcactgctggctccatccagaaagttttgaacaaaagagtaacatttttctttctggcttgttcactttcatgatgattttcacagccaattccagtaaatctgctacaataaaagtccctattcttcatccatgttcttctaaataatcttagatttgatttgaagtctatttcagttaatattttgtcttttttaaaaaaaaaatagttttgttgttttttcctgattgtaactcagatatcagctggggactgccctgcccctcaacatctgtgaaatgtcctgtggcagactgtattttccaaataaggccacaacattattttcaatcccatatgttcattccagaactttgcaattcctccatcgagagatggcggctgtgtcatctctccttgaatctgggtgggccttttgactgctccaactgatggagtgcatataattgactgtgcaacttccaaaaagcaagttaggaaggccacacagcttccacctggctctctctctcgggacacatgccttaggagccatggacagccacgtaagaagtccagccccctgaagatgcccggctgccagcaccatgcagagaccacatagagatggagagaaatcgcaagaagccccaggtgctccagctccagctgcctgaggctttccagcccagacaccagacatgtggatggggaaggctttgctgggactccagctgcaactgcaggagagaccccatgcaagagccacccagcggagcccagccaacccccagaacctggaaagatataataaatgattattgttgtttgatgccaataagtttgaagtgtttttttaatgtagcaatggataacagagacaatttggctcaagctcaagcaattctgtgtcctgtggaactcacaaggctttccaaggcttctgctgattcctggaaaaacagaatggattgttcatttgtgggttgtatgtgttcagatgctgcctctgtctgaccccacacaacatgtgaaatgtggctccaatttcatatcccacaacaacaatcactcacaccaagcatctgagtgggtagtagaccacgtgggagatttaagattatgttgccgaccacatgggattttgtcaacttgctcccttttctcccctacctcttcccagtctcatctcctctcaggttgctctgggaacccacattcttctctccctgctatgaagagtaattcaggttccctcaagtgcctaatcccaaacttccaaacttaagcatatcaagaatccagcctttactggagctaattgaggttacagacgagcaattattcttgtgcgcatgcattgtaaaaaaaattcaaggaacacccagaaaaataaaagaagaaagtaaaaattacccccaaatcccactacacggtgataaccactattaatgtttggtaaacatcctatctatatacaattttatatacataagattatactatccttgctgttctatacttccccaggtataattggtattaataatagctttaccatttatttagcacttactaagtacttagcaattatataaaggtagcatcctcatcacatcattatcttctttttcctaagggatcttagggagagtcagagcagggacctgaacccagacccacccagccataaggccggtgcacttgccactaacccattcagccatagcagaatctttccccaagatctgcataccactgtggagagactatcctggcctgcatatcttgagccagatctagcatcctaacacattcctgtgtcctctttcagagagtccaagggatcggagctccctggagtctgtgtttggctcattcctggtgaggctgagtttctgaaaggaagcgaaagtctgggccccacaggagaaacagggagggttctgtgtccccagtacagcagagcaaagccagataggtgctctcctctgcctccgtgtcccctccgggacggagggggccctgctgtcctgggagtctggggtggtctcccatgagttcagcctgaatcatctgcctcctcctcccagggagtgtttgtcccaactcctgagggcctcatctgtgcagggccagccaggcgaggaggacatgccttgggaacagtctgtgcttgttccctcagccctagaagagactctgccaggtggtacttgcccttccctggggaggagcctgcagtatgttctctgtcaacctttactgatgagcacatgttccaagcagagccccaggggactagcatcttctctgaccccttccagagaaaccctgggtgagaggctgagagaggagaccccacaatggggacaccgcagccccagaagaggaggagcagcctctggggagggcctgacctttcctttgttgactttcttgggccttgcactaattgtgaagaagtaaaaactgagttatcagtctccagctgttcccacagctgctgacatttgagggaggccaagggcagtggactcctccccaccacacaaccacactcgcagctgtccacttgaaggtgggcctgccttgcaggaggtcccctttgactccagagactcagacactcccagctcagggtaggcgtttagaagttaggctgtgaatccaaaaaccccagacttgagttctggctgccacttaattacttgaacccaggatagtttgcttaactcttctgagcctgggcttccccatcatcttagttttgtctcccccatagaagtaccccctaagatgggtgttctggtgctggtgttttaattgggaggtgatcccaggaagccccagcaggggagcaggtaaggaagggaagtaagccaatgaaagatcattgtcaagccagtgacaaaacagaagtttaatcctgctggggaactcttagaggcagtggaaaatacatgtcctggaattatcccccatctccctaaccccagggcaaaggagctggcatattgatccaccaattcccaccagtcattgtttgagggctgcccctggggagggggacagggatcatatctgtgtccctctggcctgccctatgcacaggtagagcaggctccagccacaagagatagcctaaggcagagtcacacactactcttgcacactacccttgttacaaagtagactgcgtgctataggcaaccaaggacgtgtcttcatcctccaaacctccagtgccctccagtgctctggtaagtgccaaggggatatggtggggcaccctcagcctctgctaccaccacctctaaaacaagagaaatgacactggctgcttaggatggctgtggggatatatgcagattttgttttatttgatttgtttcagtaggcagttgacttggttgaactcacactgcatattctgtctcctgggtggcaggtcaaacccccacaaatgcataattcagaggtcagcccaagattgaggcagagtttatgcactgaatttagtgcttatcctcttttgatcagtcttttcaatgatattgcctccatttacagcgaatctagtttcctcaaaccctgtccttttgccagaaaaactatatgctgtctctcagagttctattctagcatctctctatgggacatgctcctgctggctttttaaaagttgaccgtggggcaggtgcagtggttcatgcctgtaatctcagcactttgggagactgaagcaggaagatcacttgaggctgggagttcaagactagcttggacaacatagcgagactccatgtctacaaacaatcaaaaattagccaggtatggctgggtgtggtggctcacgcctgtaaccccagcactttgggaggccgagacgggtggatcacgaggtcaggagatcgagaccatccaggctaacatggtgaaaccccgtctctactaaaaaatacaaaaattagccaggcacggtggcggatgcctgtagtcccagctactcgggaggctgaggcaggagaatggcgtgaacccgggaggcggagcttgcagtgagccgagatggtgccactgcactccagcctgggtgaaagagcaagtctctgtctcaaaaaaaaaaaaaaaaaaaaatttagctgggtatggtggtgcatgcctgtagtcccagctacttggaaggctgaggtggcaggattgcttgagtctgggaggtcaaggctgcaatgagccatgatcgcaccactgtactccagcctgggcaacagagtgagaccttgtctcaaaaataaatcaataaaataaaacttgactgtaggttaccattctgcttaacaataagctgaatgaataagcacacaataactagggttgagagagtcaatcaaataaaacccacaatcaagttaaggaccagtcctgaatacagataacctgtctcattgtccaatcatgcctccaaccacatgactgaactttcagtttgggtgaaaaaaaggcccttgtagctatgtagccttttattatttctgtaatgaatccctatttggccccagagatatcaatattccaacagttcctgttcttgccccaatgttctcatataggacttcttgtccccagaaagtctacaagtctactaatccccataaccttatcccaccctctctcactcagctaaaattttctgagaatccacttctgatggtgcccctaggagaggggtgacaattttggatgagtggggagatgccaggtttccagattgttctgaggattaaataagttaatacacataaagtgcttaggatttgtctggcatgtaggcacatagtaagcccttgataaatggtggtggtggtaatattgttattattattatcttattattattctctcttcttagttgtaaatatcataagcatagagtaggaactcaatcactgtgcgtggaatgtaacttaattggaaggatgccctccgtcatggcctagaacctagacgcctcagagcctaattagcagtgggtcaggaaatacagatgcctctcctgaaatggtgatactaaggtgtattagtccattttcatgctgctgataaagacatacctgagattgagcaatttacaaaagaaagaggattaatggacttacagttccacacagctggggaagcctcacaatcatggcagaaggcaaagaagaacacatcacatcttacatggatggcagcaggcaaacagagacagcttgtgcaggggaactgctctttttaaaaccatcagatctcgtgagacttattcactctcacgggaacagcatgggaaagacttgcccccatgattcaattacctctcactgggtccctcccacaacacatgggaattcaacatgagatttcgatggggatgcagacaaaccatatcataaggtgacccaggtcagtgtcacctccaccaggagggctctttttaaccatctgaatttggcaccctcctctatgttcccattgtacaccactcttgttccaaagtagactgggtgctatgggcaaccaaggatgtatcttcattctccaatcctccagggcctgacacacaataaacatccagtaagtatttgctaactgaatataggcttacttatcttccccccaggcattttattttattttattttattttattttattttattttattttattttattttattttattttatgttatttatttcggctttcatcttaggttcagggggtacacgtgccggtgtgttacacgggtaaattgtgtgttgctggcatttggtgtacaaatgatcccatcacccaggtagtgagcatagtacccaatcatttttcaacccttcccctactcccaacctcccccctctagggttccccagtgtctactgttcccatctttgtgtctgcccccacacattgtaatgtctagctagcacagtacctgcccatagtagagacttacaggtttattaagtgtatgaaggacatagatttccttcattacatgcaggtgaaagaaacatactttttcctgctaaatctagttaaatctggctctagcctgactgagaagtgtctgatacattgattcagtaacacccaactctaatcccttatctgcgcctaccacagaggctggaaaagctacaatgctctttttttcccagcatcctttgcagttaggagtggtcaggagacacagtataggctgatgagatgtaagatatttgctggcaatgtccttactttccttcttcctgtgcgatatacagacacatgcctgggggtacagcagcccccttgaaaatatgaggtgacagtgtgaggaaaagactgagacagtcacccacgagccagccttagcgtccctgagttatgaaccagtgcctccagacatctgcctgcaggctattggctaaaaggactccagttaagtcttctggatttaattcctcactgaaaccagatggggcacctctctttccagaggagcctgaggagggataaataagagatgtttatccagttatcctgccacaaatgaatgaaaacatcttgctcaggtagtttaagtccagaattaagcatagaatttcccttctgtaaaaaaaggaagttggaccaggtgatggcaaaggttgtcgccctggagtccagcctggaagaggcggccacagtggtgacatcctgtgatccccacccttcctgactcaagctgaacttgctaagagagtgcaaggctcaaatagagagtgttccaggctattcctacgtccttcaccaacctgcgagcaaagggagcactggacagggagggagtgaggatacacccagcagagtcactgggactggaggaggccaaacgccatgcgtaagtcagcaggcaggtgtgagaaccagctcgacttgaaaggcaaagacttagagagctgtaaagtttagagctgaagagggaactgccatgaatgtgagtgtagtggagagagggtggggatatttatggagctgattctacagaccagaacagtagctgatggggaagagctgtcttcctcttaacctgctgcagattttaaattccgagaggagctcaccttctagcccactcagatgagtgcatgtgtgtgtgtgtgtgtgtgtgtgtgtgtgtgtgtgtgtgtgtgcgcgcgcgcgcgcatgcatggtatgactactggccccttagcctccaggctgattgagggaaaagctttatgctgtcacatctcagcaccagtgggcttcagaatctctaaatggaacctgcaatcacttggatatgggggaagaaagggagcaactaagcccttggcacgggtctagcgttgtgctggcacctgcatatccattatactcgcagtgaacctgcaagttagagatgatcaaacccacttcatcggctttgcagagagcacttgatgagacgcacttgatgagaccagaactcaccactggcagggcagctcccctgagcttccacatttcctgcttgcacagcttagatctgtgtggctatgtgcaagtcacccagcctttaagaacctcaattggccatttggaaaaagggggtagtttggagttgcaggcccagatgatgattccccttctccttggccctcagtgttatagtgaggatggaattaaataacatttgtgaattcttataaaattatgaagtgccatgacaattaaaggattataattattttccaccacaacaataataataagctaaatttgattctggcataaaaatgcaatggctaagattcagtgatgtagaacagatcaatttggggaaaattatacttcatatgcatttcacaagctagtggaagtgcacattgccacggccatgagaaagaccaggagaagagaaaggctcataaattcagcaagtctacccaattttggttgactcaaacgcacaacaatttattctcaaatactctgctgggcttaagggaagactcaatgattaaaatatactcttaaagcgtttaagagagtttaggcaatcatttgtattctaaataggccttcctgacacatcctccttaaaatgttagatcagaaaaagaattcaaagccagaggctggctggcagcgctcctgctgttctatcaagttgactgtgggttcccgttctgcttagacaataggctggataaatgagcatgcatagccagggcttgggaatctaatcaaatgaaaccttccattaaattaatctgacacagctttggccatttttctggaccagtcctgaattcagatactctatcctattatccagctgtgtctcctaccatgtgacccaattttgagtttgaaagaaaacgtcccctgttgctatgctgtcttctactgtatctgtgattctgctcgccttgttgaaaccccatgaacaccctgacctcgcactcctctacttgcctctctcttctcacacaggatctctcaactggaaatggtctcctcagccccatgccccagtccactcagttgaagctttctcagaattcactgctgatgatgccccttggagaatgctgattattttgggtgaggagaggtgccatgtcttggagcatctaaattcaccagcccatgagatgtgagagcaatgctgagttccatacagagatagaagaagagtgtctcccacatttagtccataagcctcaaagcacctctgcttataccagtgtcctcaacctccttataacagcagcccctctggctttccttctaagccttctgtctgcacgaggagcccgtgaggcactgaccctctgccattccctgcatccttcagtctctacttctcttccttcccaaggcaactctgccatcgacatcttccatgctgtctggccagcaaaggccttgtgcatgtcactgcccatagacaggtgctcagagttccacagatgggctatcagttcaaccaaaagcaaacctctcatctctctgaatcccactttggacccagctaccgcaccttgcaatgtgaattttgcaatgtgaattttctaattccagattctctgtcctgttgtaacttatgtgtcaaaccatgtgtttccattttacatcttgaaaaatatgatcagcctggctctgggggcttgcactgcccttaagtcccttctgactcatgcccagctgtcttacagcacagagcaggctcctacacctcccttgccagatgccttctggccaggctgggtgctggagggaagacctgtgtctctcaaataccctcgttggtcccttcctcagccggagagtgccatgtgcccagaaggaaaaagttgactccagtccagtccaaggtccaacaatcaagttttgtttaggatataaggccattgaactggtctaatttattttctctgcacttgtgtttcctaagtttttccacattatttctaatttgggctgttagaaaaggggaaaaattaaaaaccaaggatctagagataatggaatatcttggtggttactgcattaaaaaccagctggctaaaatcggtttggaagatcttagaaggcaatctgactcaaacactgtgcaaatcaaaattgggagagtccacaggccaaggagcagcggaaacactaaatgcactccctccctccctagtgaaaacacatgtggactcatgtgaacgccgtcctctcgccttcatctacttctggagataatgaaatagagagctaggaactgctgttcagattggggacccccaggcatcactaacatgtggccctatctgtgaccctttatctgtctgccttgctcaaagctgtattttcatgagcacacggtaagaccttaacgaatatttgttgaataaatgaaggaaggaggaatgggataaaatacatttcagctgactcagatgcttttttggagagttagataaacatttacaaatgggtggatatataaagaaatagatgaataaccaaattggcactaattgatatggttgatagaacactgacaccatctctcttgtcgacagtgtgtgattgaattaatagtattaagtatgtctatgatatgaccctccctgctcttttctatcatcctccttacatctttcttcacctccagaaagtattccctccacaaacacacagacatttgcgtgtctacaaaaacaaaatctttcacagatggtacaggtgctaacagagagaagaaaggggaagagtggattctaagtgtttcttttcacttaataatttaccctcagatcaataggagttttggtacagctcaaagtcctaagactgggaatataatttctagcagtgtattcttgacaacaacatgtccttattgcaatgaattatgtactagcaaagcatccatcaccaccccccagaaagtctgaccaattggtttcaacacttagatgaggcttattttcaaccatccatgcccatttgtacacgcctactaagtgtaacccacataaatttgagtgtcctcatggccttttcagctcttgcatagtcaaaagaaataaacattcaactcctaaatccttgaggaaaaaatgaagatttggagatgggttttctgatgatgtggcacaaggattttgcattgctctaactgctcttctcatgagaagccactggcctgtgctttgaatttagtgcaacaaaatctatcaccttacaactcttctagagccaacaactaggctgcataactcccttttagaagtatgcgggaaacatattcacaggaaaacatcttcacttaaggccaataggccccctcacaacactcaatacgtctcctcattcaacctagcttctcctttcttcttcccctatagagtgtggagccttggggatttaaggcggtggggtctggtgcctctgcagcctgccctgcccctgccacatcattaacatctgagcacaacatccagtctttccaacaaaagactctgccccttggcgatatccacagaccacatttactccaagttacaagctaaaatgttgtttcttgccacaaataaaacacaagttacttactccaaaatttaatgtacccaggggggcgacactgtctcatttatgctgaggcctgagaaatgccttatgtgtgaccaacatcactcctcgagggacaaatcagggtgtactaagtcccaggctggatctgaagtgttccctgagtgggaccaagggagcttctctcccattcgtcttgcttctcagcttaagacacagcagcccccaaaccaccccactgccctagtttaaactcaattattccatcttgcttgcagaagctgccattttgcctctttctgttccttgggcttgattagccacatcaacagagggaattcaaaaggcccctccagtttaaaatcagctctcaaattgcacagccactctttgccaaaagttgctgatctatctcccgcaaggattgatccaagtgcttctcattatccaagctagcttctattgctcccgaggtgctgcctgcgatagtagctcctcctaccacaacacaggaaaatatttgtgccagtaacagattcctacttatgaattaaatacataaatcctagctaacctcctctctaccctctactgtctctagggcagtgaggtggttggccactagaacagacatctggctgcgttagagttgcaaacagtctccattgttcaggcctcatctaacaacatctttcctctgcctttgctgcataccacccctgaaaccttcaaatggagccgctaacacagctcaaagcctttttctctggttccttgcatggaacttcctgtgaatttcttaggtttctagtagcaatcagcttgtataaacagtttcaaagccaacttgattgccaaccttacagtagctgttgtgctcccggggaggtggtcccagctacagcagggcaacaatgtgaatgagtccaactgtccttatcactgacctcctcattccttgcacaaagctcctgtttcttaaagcagttgcatatctatcaggattggatgtgctaatgtccgatttgcaatctcaagagagagggtttttgattttcaggttataaatgctttacttttttaacatagaagaagctcggtggtggacgtgtacgtggccatttgatgtttttatgactaaaagttacagttcaggctctctctcttatagaatataaatgtatccctacatatgcatatgtaattcttaccaaaattaagcttagttactaaaagaagattcactatctgaactttcttctataatttttcactttcaccatcaggcactggagcatctggcctctcaggaaggtctgggactagtccttctgatatcattttgctttttgttttgctttgtttttgttttgagacaggatctcactctgtcacccaggttggagtgcagtggcgcgatcttggctcactgcaacctccacttcctaggttcaagtgattctcctgcctcagcttcccaagtagctgggattataggcatgtgccaccacgcccggttattttttgtattttttggtagagatggggtttcaccatgtttgccaggctggtctcggactcctgaactcaagtgatccacctgccttggcttcccaaagtattgggattacaggcgcaagccaccatgcctggcctaattttgtttttgattgccattgctggtacacctacttgagctattttgagatttctggcatatcttggatccttggctacagttaagctatttcctgctgatccctcactttcctggggtccagagtcttgtgtactgttctgtaactgctctgaagtggcttcagaatgtgccgaagtccatttgtgacactagtgacacttaaaggagatacttcaactgtgacatcatctaggtcagagacagatgacaactttgtgtctaaaatgttgagagttgtttcaatttgttggatacaaagacaaaggtctgccagtttctcctcacaaaccgtagaaaagcagttgaggaactctacagtgtgcaccacaaattggtttagaaaagccaccgttcttttctgttgaagagttggcaccttggtcaggtcatgcctgaccccatgagaggaagcccatcgtcatccatcttctccgagggtgggggcctcagggttcacccacaaacccctcccagatggggccgcccaagccagtaatggtgtgtcaagagggagttttcgtaggcatcctccatttaactggttcacagggccctatatttatttgattctgtgtgtggtactgagacctgaaaaccatattcttctctaaaagagtaattttggccaggccaggtggctcatgcctgtaatccccacactttgggaggccacagtgggtggatcacctgaggccaggagttccagaccagcctggccaacacggtgaaaccccgtctctactaaaaatacaaaaattagccaggcatagtggtgcatgcctgtattctcagctactcaggaggctgaggtgggagaattgcttgaacctgggaggcggaggttgcagtgagccaagatcgtgccactgcactccagcctgggcgacagagcaagactctgtctcaaaaaaataataataaaaaaataaaataaaatagtaatttcgacaccagaatagggtctaccatttcctctcaggctttcccatgctatttggtccttataactgactcacctacacttgtttgtattacaattccaacaacttagcaatcccagaaggtgtctctgtgagtcaggtcatgattattattttaatctaagaaacagaagattgtgcctcaggcaaagtcccactcatccctccaccccacaaatagaacctacacaaagctgggtctgtttgtagctctttccacattgggttgcttgctaaagcatactcaaatccaacttcgaaacagtggggaccttttgtgacataaactggctagctcttcaccccgcctgattcctcttcctcctggccacacaggtagataaatttcccagcctcccttgcaactaggattggtcatgtgactgtgttctgacaaatgacatgccagtgggtatgatgtgggccacttctgagcctagactataaaaacatcctgtatccatctctactccctttctccttctcctggcttgatgtaagtgagctctgcactatcggaaggatgtgttgaagatggggaggtgcccagtccctgaatcatcacttgtaggagagatgcccactaatttagaacaaatattttggactctactatgatctgaatttgtcccccaaaattcacatgttgaaacttaatgatcaatgtgataaacaggtggggactttaggaggtgattaaatcatgagggttgtacctgcatgaatgggattaggctctcataaaagggcttgatagagtgagttcactctcttccaccctctcaccatgtaaggacacaacgtctccacttctggaggatgctgcaataaggaaccatcttggaaacagacagcagccctcgccagacaccagtcctgccagaatcttgaactgggacctcccagcttccagaattatgacgaatttctgttctttataaattatccagtctcgggtattttgttatagcagcataaatcaactaagacagactctatgtgaataagaagtgaaattctatcatgactgagccacgatacttttgttgatgatagtagtcggcattacttcatctaaaacattataatgagtggtttcctgatgtggcagcacatcacacagaaaaccttcttaaaattcttcaaacatcttctcatctccttcccaaccactccatctctattccctcctaagagtctgcttcccactcatggatgtgcctgcaaccacaattctttgagaaatataatcccactcttattctgaccccttttcttctgagaggctgccattatctttaccctgaaatgtgggtaaattttaaagccttcatctgaacacagaaagtttgctttaataggttaaacatgttctccaacaattttctctagactcaataaaagtaaacttcatcctattccaggctaactgaacagatgattttttgaaattccaaagtaatctaatataattaaaataatgtggtattgttgtacaatgattattacaaaagcattatttgttcatcagggtaagagagactctgccataggagacagccagtccccctcaaatctcagtgatgtgacccagctgtatgcacacagtctgtttcaggtcccagagactctagggcacttgtactccatggggtagctcagagatccaggctgctttggccttggggcaccatcatgtcaacatgtacttccacagcagagggagaaaacactgtaggctttcacacaagctgggccattcaatgctctggcccatatgcaagttgccacctcagatcacagctcattgcccagagcaagccacgtggttcctccaaacttaagaggggccagggaaatgtcatccttccatatgcccagaagggactgagagctggatttgggcgatcaagatgcactagaagactctagctttgacatcttttatttttgtttcttaatatttataccttaaacttctgggaagtctaaatttttctcaaaaataatcttgtgtttgaaactgttttttttttttttttttttttgctaagtgatttggactttttctttctagccccagctaattagaatgaatgtaatgtaaggaaacatgttcctttaatataaacaagagcaaaggaaattagaaccctaagagaggaccgctccttctctcaggagacacactccactgggcaggcctggaggccagtgcaggtgggagagggtcaggagaggaggtgcttccagcattgtgttccccacccctcctctttccaagtcacagagctttctaccacgataaaaatacctagagcctccgtcattttagcaagatttaattaaactgccctaaattagaaaatctagtcattgtttgcattcctagatgcctatgtttagttgagtcacacgtaagcagagaaatgaaaaattagcttaattttttggctgcagggaagggtgtgaattagctttttgtcactcgtggggaacatcttgtgtcttccctcagctgggtttctctgatgggattgcttcttcccaccctcccgaaggtctctaaggacaagctgcagcttggctttgtcctgggggaatcctccagagcccacagacagaccagccagatggcagaatccaggggactcctcctgagaacagctgtgacccttccaggcttctgagtaactgacagctgctcccaggtgggcctagaatggaaaggggggcttctcacatgtgggctcagagcagagctgagtgctggggaggtgttcaggaacctcttgtcttgaaaaaatgactcagggaaacttccagaatcccaggggtgggggagtggaaggctgtagagaagcagtgaatgcaatgtttaagaacatagttttggccgggtgcggtggctcatgcctgtaatcccagaactttgggaggccgaggtgggtggatcacgaggtcaggagtttgagaccagcctggccagcatggtgaaaccccatctctactaaaaatacaaaaaattagctaggagtgttggcgcccacctgtaatcccaggtactcaggaggctgaggcaggagaattgcttgaacctgggaggcggaggttgcagtgagccaagattgtgccactgcactccagcctgggtgacagagcgagactctgtctcaaaaaataaataaataaataaacaaacaaacaaacagtttctggagccaccctgttttgccttgaatcctggctctatcattggtgagttctgtaactgtgaacacggtactcaacctttctgtgcctgtttccccctcagatcatcctagcacatgccccaccatgttgttgtgatgattaacctagttactagacgttaatccttataacagtgcctggcttacagtaagtgcccaataaatgctagcttttgttattattacaaagaggccgtcccagccaagcacctgcctatctctgggaacttccacctgctttcctgtggcagccccccaggcattctccttccagaacgcctcgctgttcaagtagtggagagtttttaatttaatttaattaattaatttttttagagacagggtctcactctgttgcccaggctggagtgcagtggtgtaattgtagctcactgcagccttgaactcctgggcttaagcaatcctcctgcctcaggttctccagtagctggtactaaaggtgtgtaccaccatccccagctaattaaaaaaatttttttgtagaaatgggatctcattatattgcccaggctggtcttaaattcctggtctcaagtgattttccgaccctggcctcccaaagtgctgagattacaggcatgagccactgtgtccagttctgattttattttggtccagaaaactgatcactttgatggaccaatctgcaggcaatgcctgatctgtgggtagggagagctacaagcagcgtggtatctcagaagctatccaggatttgagtccagcaacaaagctgtcatggggaatagcctagagctggagaatctttcagaaaacccagagccaactcaggccctggaagtaaccatggaaacaggagcccacagaggcatccagggtgtgggataggtacgtgggtggatggatggatggatcgatgggcagcggatgggtaggtgggtgggcaggtgtcactttcacagcagaagggcgagggctggggcagcagctgtgagcacctctgaactgagggaggtttgggagcttggaatgtgtcctagggtagacagctgggcatgataaagacaaacagaccaggacagaaagggatcttaccctgagagatttctcacaacttcccagcctagggaaggagtagaggtcaagggaggaggagcggggtgggtttttggagcagggtccttgagcttccactccatatctaggtgaattctgccccatctagactcttacatgttatagctccccctgccctctccctcccatctataccagccaggcttttccaagccctctgtgctccactctgccacaacctgcagacaaagacatgcagtcagtgcatttagagcagtagcttccaagcacctcccaccacccttggtgcctgcatggtgttgtgtgcagcactgtgctgggactgcagcatcctgccaccaacggcatgtatgtcctggctctgtagcttccaagtctggcttctggccccaggagtctgtgatctggctaggtacggtggctcacgcctgaaatcccagcactttggggggccgaagcaggaggatcacttgaggccaggagttcgagaccagcctggccaacatggtgaaaccccgtctctacgaaaaataaaaaaattagctgggcgtggtggtgggcacatataatcccacctacttgggaagctgaggcaggataatcgcttgaacccaggaggtagaggttggaatgagctgagagcaccccactgcactctagtgtgggcaacagagcgagactccatctcaaaaaaaaaaagagtctgtgatctacctaaaatccctcactacattcttctgcccaaacccctccagcttcagtgggaacgtggaatggcacccttctaaaatgcagtgcggataagttcacagtggaagactttattctgagaaaaggaaaacaaagtcctattgaagactaagagaacatttctcagtgccaaccaggactcctagagagcctgggcatcctgggctgcatcctggacctggagtgaggtccttccagccaaggatagcaatgaggactttcctgtgccccctgtctccaccttgggagaaatggatgcaggatgtctaccagcttctgctcatccatcagcagcagagaatgccagggaccccagtttctatgatctgcttcttcctataatctcgacaccctgtggttttatatgattgagttctggccaggggctgtgcagaggtgaagtctgccactttcagacctggcctcgaaagcatctttgtgtcattgtccatgctctgtctcttcccttatcgctcaacttaatacagaggatgccgggaaaggattctggggccctgggagctggcagagatctagatggaaggatactgatcttggaatcaccatgtggggaagacgctttccaaacacccaactggaccataacacaagcaagaaatcattgttttctagttgccctcccccttgtccgaggttctactttctttggtctcatttacctgaagtctgaaagtatttgatgaaaaattgtggaaataattaataaatgttaaattgtgtgcttttctgagtagcatggtgaaatctcttgctgtcccatccaggacagcaatcctccctttgtctggcgaatccatgctacaggtgctccccaccccttagtcacttagcagccacactggttatcagatcaactgcctcagggccacagtgatgtccaagtcaccctttttgtaataatggccctaaagcacaagagtggtgacattgacatattgttataattgttctattctattattagttattgttcatctcttactgtgtctaatttatgaattaaactttatcataggtatgtgtgtatagaaaaaaatttctaggattggtactatctgtagtttcaggcacccactgggggacttggaatgtatcccctgcagataaggggggaatgctgtattatgttaagtccctgggatttgggggttgtttgttacagcaattagcctaccctaattggtcctgcacctacttgagacagttaagagggcagatttggataccacagagacatgtttgagtctaaacaccccacttaatgggcatcattaaatgaggtaataatagtacccaagtgagggcaagaggcaagcagagagcttggcacagggccgacgcatcacaagcactcagcaattggcactcgtcatggctaacattttcagcacttgctatgtgtcaggccttggtatatagctctttaatgcatcttttaattctcacagtaatcttatgagtgtgggactctcataggtttcaagatgaggaaaatgaggcatagagagagtaaatgtttcacccaaggattcatggctaagggcaggactgggacagctagcttcatggtgcggggctggctcttcattttctctgccatcttcatcttccgtagtcacctgttgtggtgggtggtagttgaggctcctccactccctgaacgcaccggagggcctcagggtgaattgttctgatctgggcattccactggtcccagaaggtagggccagtgagaggggatgggggcttcagttcagctgtcagcctcccacagaaagttcaggagaggagagacagctgactgcataggatatgcctgaggccaagggagagggagcttctgggtccctgggcctcaacttctgcacagtggtcttcaggaggacctagggtagaggggaaagatggccagacccctgaggctgagaggggccctggagggaggtggttgcccctacccttgcagccatgttgtcctcttgttcatttcctttgtggtgactctaagtttaaatttaatcaaacttctcttaattattccaaccttgggccaggtgcagtggctcatgcttataatcccagcactttgggaggctgaggtaggtggatcacttttaaggtcaggagtttgagaccagcctggctaacatggtgaaaccttgtctctactaaaaatacaaaaattagccaggtgtggtgtcaggtgcctatagtcccagctactcaggaggctgaggtgggagaattgcttgaacccgggaggtggaggttgcagtgagccaagatcgcaccactgcactacagcctgggtgacagaggaagactctgtctcaaaaataaataaataaataaaaaattaattattccagtcttgtctcaggatgtcctgaggaattcagtggagggcccccaagggagcagtgcctagtggggctggtgaagagccctccaaggataaggaacttggagcaggaggcatcagaggagggaacttgagggctccaaccccacaggtgtgggccctgtgcaggccagactggaggatctgggccccttttcattaaaggactcttagagaagctcttcagacacaaccacacccttctctgcctcatcgctggcctccagggagcacacagggatggaagggctgtagtcaaatgggggagtggcctctgcagataaagccaaatggcccaggcaaggactcacctataaaacaaattcagtccagcatccaggaacaatgcaaaagccatataaacatttactgttgcctcctgagaaaacacttcatgaggaattgcatttgtaacgtgcagcaaaacttctaaaatcctttgttctccaattttcctctcaatctctcccctccccccactccaacttcactggggcctagacctggcttccctcattccagggtctcgctctcctgcctccctcatctccaggcctgcctccatccccagcaacgcccctgcgcccttgctactgtaaagccacccagacaggctggctagctcccttgtcctccgtccccatttccaccatcaacatcaaaacggctcaagaggggatcctcttccaaggaggaggagaaactgtgacagatcctaatctcaaattgtttccaaggtaaagaattctgggaggagcaggcacaggaaaccgtctgggagtctggcatggagggaggcgacgacaaaggcactcagccctcacagtgctcccaccgcaggcaggccctgccctaagacctggggcagtgggtgggtgtctgccaaaccgagtgagacgcagaccccatccctgatactgaccgccgggtgcagactcatggacacacagctctcgatccgcacccccaaagtcaggctgctcaggggctcaaccttggctccaccctggaatcatttaggagcttaagaaatgccgatttgccctcaccagagactctgatctaattggcctggtgtgaggcccaaggcatctaggaggattggctaaattaaaatctccccaggtgattcgaatatgcagctaggactgagatctactaagctgatcagttgctcaggagagcaccccagagcctgggggctccagaccacagctccaagcacagtgactccctccccatccagttcccttcttgatgcatcaggaggaaggagttggggccaagactctggcaggcacagaataacttaacatagcagctggggcctcattcattcgtcatccaatcctgtattcaataactatttaatatacgtgtcgtgaaggcacaagagaaactgaccaaaggctccagtttagactggggagtcaggcctctctgaggaggtgatatttaaatcacctgagtggcaagaaggggcctgccccgtgaaccgccatgccaagcagggagtgtggtagtgcagaggccctgcacagggagcaaagcgggcatgcggctggagcacagctggtggagaagagagcagtgagccgaagtttgggaggtgggcagagtgtatcatagggggtcttggagctgtggttaggagatggttttcattctcagtgcaatgggaagtccctggaaggctttcaggagggaatgacatgacctcgtttgtgtttttaaaagacattctggctgctgtggggaggatggctggtggggagcaggatggacacaggtgaactgtccagtccttcagggcggaaagcacctctgtgctgaaacaccagggggaaggtcaaggacccaactgttcctcacagtggggaatgtaggtcaggcagctccctcagccaagctgccagtgcagccccctcgcctgtcagggggagaaaagctgagtctgagatgtgtgggctcagctgagagatcatcattggcagtgaaggcagagataacagtcggccaggtgcaaggatctgggccactgactaaggtctcttcatcccccttcccagggtgcctctccctgcacacctgtaccccctcaccatcttcccagcaggccagccaggccagcccagaggcaggcctcaacctgcgcctggagcagtggctgtattttaagatcagggctcagacctctaaataaaccataaacaaagccagcttccccggtatggaaggagggagatggctccatttcttttcagcacgatgactgggaaataaacaagtggctctgcctgtcacatacacttaacctctgcaaaggcatctgtcagacccacagagcttctgtctcagcctttccaataaataactgatgtgccccacattgggcttctccctgcaggctccaagttcactctgccattcaaggaaaggtgagcaggggggcttgtccctgaccccaaactcacagaaagagctatcaaagggcaggcttagacacagggccctagtgtagctggaagcatgttggcacagctctctcagctggggaaggggacaagggggagggagagagggaggaaggtaggaggtcgggttgttggcaagagcaggggcagagctgagaggggcaaggagtggcctctgttagagagatgggagggtgagagccccaggggcccaggcagagcctggtctgcaggtggggtggccgtgggtgtggaagaaacaaagaaaaacagaaggcagagggctctctctccatgggtgaaatctcccacgaccacagaggatgaaggagaaagaacaacagacaggaacagaaggaggcgggcagatacatgaagcaggggagggaggaaagccctggaggaatcaaactcaagtatgtgtagaaggaaggaccctccaaatgcagcagaaaaaggtgatttatgcactgagctaaaccagaatagccaggagccaaggccaagggaatgggagcggctgggaatggcgacatgtggcagaagccacagaagggggctgtgagctctggaggggccggaaggcaggcagctcgtagtgaaaggataggggtgagagctagggagagccacagggcccatgaaggctgtcccgtaggtgctgctgctcaggcccctgcagcagagacaccttgcagccaccatcaccccgccgaaggtgtggaaggggggattggaaaagggtgaaagaggcactgacacagggattataaatgcactgaagcacacaccccctcagcaagggtggcactctctccacagcacccccatggggatgaaggagatccaggggctcccagactgcagccaggtgtgtgggagccacagacctccaatgatggacccagcagacctagatagaggctgctgtccacacacagaccctgaaagaaagggagatgaagacaaggataaccaagatcagatttttctccgtctctccctctcagacacacacacacacacacacacacaaacacactgggaaataaagggtggcttgtgtgtgtttgagggtagggcagaatggaggactggattcctcttttagggacctgaagaaaagtttcccaaagcctggggaaaggtcatacacaagaaagaggaagtgtgtgtggccctcactaccctactatccctctcccatgtggctgcctctgtggaatccaccacatttgcagaggcctgcaggggcatgggtgtgaagccctctcagcaggaaacacacctgcattcacacccacacacatgtccagaagccagtgggtcacagggatgggtcagacttggatgcaggagcccccattcgaagccagattaacggtcctctacaggtcctccaaggaggccccaagccctccagagctacacagagcaccttttcagctgggacggcattgccaggattgcgtaaagaaagaatgtacttcccactgtggcagtggtggttgcaccatgaatccagagccaccctgcaagggcattcccaggacttctgaccgagacatgtagacgctagctccctgctaagctcacacaaccacggtgctccagtctttgcaagtggacaccacagagaaacaccaaagggagggggctccccagggactgggtccatttctcagctcagcccagtaggcagggccttaaggacaatcccagcagaccaagagctcagatctgggccacgagtcttcttaggaatagggacacagatcctgagcacatctaccagtccccactccagcttgaaccccccagtccccactgtcggcaagcacaccgctctcaacatattccacacacatgagcccgtcacagtcccaagagtactacactgtacacagcacatgtacacacagcacacggttccccatgccacacactgcgctgacacacgtcccaggtcccccctgtgccgacgcatcttcccatccgacagaggacccattttaatgaacgcggtacacacagacactgaaaagtcctgctgtcctcagcctacatacacacacagcgccctgcagtcccgcacagccagcacaccacaccggcctggacacaaactgtgcccacacagagctcccgaccagaactcagcgactcccgcccccgccgtgcggcctgcgctcccgccccccgcgtactaagccgatctccaccttggacttcccggccccctcttttcccctccagctcctgttccccaacaaccccacccccgggcttcgggaaacttttcttcaggtccctaaaaggggacacctggagttcctccggtcccgccctgtccccggacacgcgcaagccgccctttatttcccagcccagctcccgccagacccagcggggaaaggtcaccgtaggcagccccctgcctgcgccctgggggtggtgataataacagctgtcaccgggggatggtcggggggaagggagaggtgtcggccccgcgccgagccgggggcgcaaggtggtcgcggtgacgcgccggggaagcgcagagaagcagcggcggcggcggctgcgccttccgagcccgggcggcggccgaggcacgcggagctgtccgttcagcaccaccgcgccgcgccccgcgcagggcgggcgccccgtcacacccgctctgctcccgccccggctcacggggcgaatgcggcgcgggttcctgcctctctgggtgggtgaggggcgcgcggatccggagagggggctccgggagcggcgggaccacgcagccacctgtgagccttcggcagctgcgggcggcggcggcgtacccggcccgagacgggaggagacgctcggcggcccccgcccgccggcccgccgggcgcacacactcgcacccgcgcacgcaccgccagcaggcagcggccaccgccgcgatgctcgcccgcgggttggggaagtttcccgccggcctcggccgcgggcacccgtgctcccaggtaagcgcttccagaacgcgcagggcgagcccgggcagccccgctgggtgaggcgcagcgcacgcggccccggggcatagcgccaggccggcagggagacctgggccggggacgcgggggctgcaggcgtgggatctggacccaggggaggccgggccgcccccctcattcccgcggcccgggtttccagactccagcgcatcccccccaccccaccaaagctacgcgccccccgtgtcggcccggccctgcccgtgcgtatctcagctccggtcccgcctgtctgcggcgagcgggcgggggcgtctcccgggcctgcccatggacaaggtcagcatgcagccccctgggcgctcagagccgcggggacgcgaccccgcacgcgcaaagcgcccaccgagacccctggggtggagctgtgctaatagaaacatacccacccccagcctttcctgggaggggatcagacccctcaaactcttgccccagcccagcccttcagcacccaagacccaccaggaggcctgggcccgccagtaatgggtagggagagggggccccgccagggcgcacggcgctctcgccgacgctgttccctccgcttccaggtgtagcgcccccgcgcggcgcgggcggccggcgcctccagcatgaccggccagagcctgtgggacgtgtcggaggctaacgtcgaggacggggagatccgcatcaatgtgggcggcttcaagaggaggctgcgctcgcacacgctgctgcgcttccccgagacgcgcctgggccgcttgctgctctgccactcgcgcgaggccattctggagctctgcgatgactacgacgacgtccagcgggagttctacttcgaccgcaaccctgagctcttcccctacgtgctgcatttctatcacaccggcaagcttcacgtcatggctgagctatgtgtcttctccttcagccaggagatcgagtactggggcatcaacgagttcttcattgactcctgctgcagctacagctaccatggccgcaaagtagagcccgagcaggagaagtgggacgagcagagtgaccaggagagcaccacgtcttccttcgatgagatccttgccttctacaacgacgcctccaagttcgatgggcagcccctcggcaacttccgcaggcagctgtggctggcgctggacaaccccggctactcagtgctgagcagggtcttcagcatcctgtccatcctggtggtgatggggtccatcatcaccatgtgcctcaatagcctgcccgatttccaaatccctgacagccagggcaaccctggcgaggaccctaggttcgaaatcgtggagcactttggcattgcctggttcacatttgagctggtggccaggtttgctgtggcccctgacttcctcaagttcttcaagaatgccctaaaccttattgacctcatgtccatcgtccccttttacatcactctggtggtgaacctggtggtggagagcacacctactttagccaacttgggcagggtggcccaggtcctgaggctgatgcggatcttccgcatcttaaagctggccaggcactccactggcctccgctccctgggggccactttgaaatacagctacaaagaagtagggctgctcttgctctacctctccgtggggatttccatcttctccgtggtggcctacaccattgaaaaggaggagaacgagggcctggccaccatccctgcctgctggtggtgggctaccgtcagtatgaccacagtggggtacggggatgtggtcccagggaccacggcaggaaagctgactgcctctgcctgcatcttggcaggcatcctcgtggtggtcctgcccatcaccttgatcttcaataagttctcccacttttaccggcgccaaaagcaacttgagagtgccatgcgcagctgtgactttggagatggaatgaaggaggtcccttcggtcaatttaagggactattatgcccataaagttaaatcccttatggcaagcctgacgaacatgagcaggagctcaccaagtgaactcagtttaaatgattccctacgttagccgggaggacttgtcaccctccaccccacattgctgagctgcctcttgtgcctctggcacagcccaggcaccttatggttatggtgtaaggagtatgcccagcccctgaggggagagatgcatgggatatgcacccaggtttcttttacagtttttagaatcgtttttagagggtggtgtgtctgacaccatgcctttgcacctttccatgaaatgacactcactggtctttgcatcgtgggcataaaatgttcacctttttgccagatgagtacacccagaatgctaatttttctgtccatcgtgtacgctattctagtgcttgtggcccagtactgtctatgagttgtcgtgctcctgtttctgaggttgtcgtgtgagttctgtacaaaaagcccccacaagtcgtccagtagaaatgcatctatgaggtcagcaaggatatgatgagattttgctcacagtcatgtgaaaacaaaatctcagctctttatccattgctttcacttagttttagtaccaaaacaaagagaatgcaaagttaagcagacttgaccaatgcaagtctctaagttgtttttataaatgatctgtagttccgtggcttgcatgggtgcaccaatcatctttagaacgatgtacactgatgttcatctcataaatgtcactctttagagaatgttacttagttaaacatgcagtgaagatcgaatttttttcccaagaacagatgtgttagggagaggggcttcagctaaatagtccaaaccctagggtgcttaaagccaagttagtgcaggctgagccccttggttcacagtcaagcctccttgtttcctagggtgactgtagagaaatgtatttccggatgaggtttctgatctaggccatttgaccaaactttgctgtgtctaagatattagcatgtttttgaaatatttattttttaagatgtttaggagtaaggtcgtgttgtcttcctcaactaaaaagaagtttactgttgtatcgtctccctgaggtgaacgttgttgggttgctagcaagggcagtagcttaaatacttttgttgcctactctgaaagctcatcaaatgagagcccttttatttccaagcagaatttagtcagataattttgcttctaggatatagtatgttgtatatgatgctgtgattgccctggagttcctgccatgacatggaaacctggtggtatggaagcatgtactcaaaatatagacgtgcacgatggtggtgtggcttacccaggatggaaacactgcagttcttacttgcattcccactgcctttcatggggggtgactgggtagaggccaggagaaaggaaagagttgtaaaataaaaaactgctagttcataaaatgtcataaaaaattgtaaacttgaaaagcttaatgctattcaaaagaccttcaagcttccaaacttgtattgaagggagacgactgtttcctcctccaaaatgctcctgctcctcttgttcggttaaccagcacataacattgtgatggggaacctgggttcctctataagataattcttctccatcatctttaaggtaatctgatggttttccaggtggctttcattattgttccatctttgaaaaggcaatagaacccaggggtctgagcatggagctatccagggttttcatccaaaggttgggcctcttcttaagaggtccttttgtgtttcagttgattgaagatgatacttacctcattggaggtgtggcaaggatcttatcagaaggctttgtgttcttgtagttgtcatggctactacagtgtgggtgatttattgaatgaattcactagccacttgtgtcctggagcccccagttcaaatctttccattggactggaggcttgtgggaggctgggaggtggctgtctcctagtgtctacatccgtgtctctgaagcatcaggaaaagtgagatgacttagaggcaactgggcactgaatcagaggagcagagttatttttcagaatttgcacatggaacacttagatttggctggtgcttccagccctggaaggcataacatttacggactcatccccagctgcactgaaggcaggtggtggtacagacttatgaggacggatcagtttgccaaggctgatggtattgggtcactgagcctggtatccatggccgctgaccaggaagcttatgcaaagtggaagcaaggaacaaggcagaataactcagtcactttcatgaagatttttctaaacaagaaggcttaccaccaaaaaagaggtaccctagtggttaccctttgcagatgtgaaagctggaaaacttgacttttctttttggtaatgacttgcatttatctggtgcctttcgttggaggaatcccaacgtgctttagagactatctttttaacatctcttgtacatacatatatacttatataaaatattatcttgcccaactggacctttactcacttctgagcatgagaatgtcccaatagcattgagtttttcaagtggtggtttcagataagtgggagaaagaacaacccggctggcttaaaccctggagctaattcccacaaggaatgtagactgaatggtgacccagggagaaataatcttcctctcccctaaagtctcactaaggtttgaagtttacaggtgctctccactgggtctttgatcgaccttgctagataacatctaaccagcagtttcttttagtccctgaagctaaccagggagagtcaggttaattttctgtaaaaatatgaggtgacatctttggcaaccaggctgtcagactgacctgtaaacctcctttagggggacagagtagaaactggagatgacttgtttccagctgtgagcttgagagaagtgtcactcccagcatttgaaggttattgttttcaatgccagtgggccaaatatatgggccaggctttgatatctgtgatgtgcattttggaagtgctgggttgggaagtgacacgtctgttgcacaaatgcatattggttataggtttgtgttttctgccaaacccccacatttctcgggtttgtgagtgaggaagggcatgttgtaatgccaagctgatttgtagctcgtaaggtagtaattggtatttaacatttgcatttgttatttctacttatcttagcactcaaataattgaactacctgctaattcttgccgcatttcaaagaaaataagttgttatgcactttgggatagtggtgatctgtacaggctgtgtgttagctacttgaaggcgtaactggtatttcttgtgtgttttaacagcatgacttcttacagagctgtaatttttaaaattgaggatgccatatttgagatgtcagttttaacactcattaacacactactgtgcaagcattgacacaggctgcactgaaccattatgtctgattgctgcactttcatctctgtgcctcgattcgggaatgggcagtaatactgacacactcgggactccagcctcaaaaagtgtgcagattaaatagacaaaaattatttgcatctcttggaggcatttcaattacatatgcagtagcaaacaaggagggcattcaaagttggggaccagatttcctgagaaagcctgggtgttttttttgtttgtttgtttgtttgtttttgcaatttggggaaggagaagctgttgtttattcttggtaaaggcggagtcctagttttctaggatctcgaaccactagcctccttggtagaaggaatggtcctgtattcttgtaactcttgtgaaacagacacccctgcaggattttcctcctgcatgctttcctgctcagcacctctgtcagcctgccctgccagccccaacctgtcccaaagtaccactctccctgctgccgaagtaggctccctaatagtaaattggggaaccctgagtgtcctggctggttgggcatgaatactgctgggggatacatagagacacttcttggcattacttaaaatagactgagtatgggccggtccaaaggccatggtgaatcggtaggaaggccactgggctgacttggttctgctgggttttgcctccagctctgtgattgtaggcacatcctgtggcctctccaagcctcaccttccactgctgcaaaatgagaaggttggattagataatccttaaagccctccctacccacttcttcacctcaatataaaaacagaatttctgcatgtctctctatgtcctcattctagccatgagccgatcctgatatccctaatttatttttaagaagagcagagagattgcttacaaacaaccttctatttggtttcatttcctcttcagcagtcagctacaatagacgacagttgcagggacaatgcaatcaggaaaatgcttgagctaggttctgatccaagtgaatcaagttttaaaatcatcagcttgtctcctttgggatttccactatttccacctatgtacacggaatccagattcctcctattaacaatcattaggcagaggaaaatcaataagatcccattcgacttcagggctaactctttgctcattttggtttgttgcctttgtgaaggctaggagatcccctacctgttcccatgaggttattgggccccagaaggggccctgaggtgtatggagcagatggctctcccatccaacactcaactcacactgagcagtggtggcatctgcaggtggcctcgtctgtgtatgcagcaaaagggtgtagaaatctgtgttaaccttgccccgcactcgttaaggctgaggaaggacgcacagcactgctctccaacctcaccacagtctttgcgttccatcaagtggggtgtagctcagctcctcccctttagccaccatccctgcagcaagggtataaatggatattcagggggtattttagggccaggatgccttacatcttaaaaggaaaaacaaacacctccccttgagggaagaacttaaatgttgcatgtacacggttattatctcctcctacttttaggagaaatttaaactagcatttccacccaaggcccttacatggctgttacatccggtcaatggtgcaggtctgaaactctgcaacattttcctccttctgggacctcacttgtcaatagcaccatcctcctgggtaaattctcccaagcaaatgactgcatctgcagctggcagctgatgcattcagaacagagatgcaaacaaggcctcagagacccgtggaggggaaacagagggaggggaaagagatacaagagaaggggagaagaaggctggcatgccttggagttgtgtaaggccctacagaaggaacagtggataaaaagaaaccagaaatcggagggaaagagagaaaaaaaaagagggaacaggatagagtgaataaaggaaagggcagagaagaaagaagggaaaagagcagagagcaaaaagagaggcaatgtctagtgacattattctaggccttccattgagtctattttatttccagttaacctagtgtgctcctagcccagcaagtcctcctgggggcaacgatcactggggctgctcccactgctctccacctggactggcccccatccctgcttgccagagggctccacaatctggtagaatagagagcacaggagccccctggaagcatttttggatgaagggggcaatgaggacacgaggaaagaggaataactatttcctttgtgaagacaggacttctgggctacaaacagaaagaggactccaggagccagccagacagggcatggtgctgggagtcagggctggccaggtggagggaagggaaaaggaaaaaaccttttcctccagtaacagggacctgcataggcagagagaaggaggctgaagcaccagcatgtgtgcagaacatcgaagtcagtaagtctagagaaaagcaaggtgcagatggggggcagaagtaagccatctgaagagcctgagcttcattcttttgtcaccagggtacagatatcctgaccagatgaatgttgtcagaatatgactctagcatcagcttggaagtgtgagaggggacaggtggctgatttgaggtcacggtcacagtatagatcagatacaaagggagtggggtggggaggaggggcagtgcaggtggacggggaggcggctctgcaggactccatcagtgactggatgtgggatgagggagagggaggggaggatggtttctgggtttctggctgggttggtggctggatggatggtggtgccacctggagagacagggaatactcagagccatgttgcccgagtgcctgggatacacagagcgggtgtgcagtgggcagagggaggcctggaggccaggcagcaccctgagggagcctggcatgagaaggggcccttggggatgagtgaggccatagccttgcttttctcagctgactccttatctgccaacctatttctctccctttccctgagaaatcctgagggggtgatctctactggcgaccttggctttcctctcctgtcacttccttgtgttttctctgtgaccggcctctgttcccaccacccttttggaactgctgtcctgatggtcaccagtgctttcctaatagccaaattcagtggcctgtcctcaagctcccccgaattctttggccacacagatcaacctctaagtcctgggaactccctcctttgtgattttgaggcgctgtgtgctgcaggctctgcttttccctcccatcaccccatggttcttccttctcctctgacccctccctcttccatttctcccacagctctgtccacagccacaatgtccataggagcctgccacaccctttatccaactgcagcctcaacccacctgcaaaggacccctgtgtctcctgcccgacgccctcactcccgagccccacacccacatcacccatgtgcattggcattcaccctctctaaaatggaatttcccacttcactccaaacttgctcttccttctgacttcttcctcatttctatcaatggaaccacagtgttcttggcccttcaggttgaaatttcggtcatctttgaatcctcccaatgtatgtatccctttactcacaatattgattatttactggcagctgagtaattgccaagtaccatgttagatgcaagggaaataaatccaaagggcattgcgcacagtcataagcagtgtagacttgagagacactttactgtgcagcagaatcctctggggagctcttcacaatgtagatttctgggcatcacccatctacaaattcagactcttgaggtgaaaccaggaatctgcagttaaaggctcccaggtgacttgggttcaggtggctttcagaccactcatggggaaacactacttcaggggtgccccttgcagtagtgcctctgtctcctcacctgcacccaccggaccaggtgtcacccacactttcctcggtatcttgcacatcggtcctcttgtatccatcctaaggctctcaccccgcttctgtccgtgttaactcatgttcattcccaacagactcatccctaggctctcccccaacaacccatccttttctgcaacccctccactcccctcacacacaggctaatctttctctttccagtgtcttagacttactagtgacttcttggccaccgttggtgctcctgttgaatataaccgcagatgccaagggccacagccgaggaagtggaaaatctgcacgggcccagtaaggctctatctaaaagacagaaaaggatttaggaaggagttgcctttcaaccagcaaccaggcacaggcagaagagacattagagctttgtaacaagggacacacagagttggcagcacaaagggcctgggcctctgaaggttggatgaccaggctcatcatccatccagggatgaccgagcctgtgccctagactattggcctcccacagcagccagtccatctgcccagcagtccctgggcacccaggaatgcagcctacacggcatgagcgggcaggctgggggtatgtgtggcaggaacagaattggggttcttggggaggtttttttccacttaaaactctttttgtcgcctacgtctccagacatttaaagatttctgagctattttcagacctactatgaaaagaactgaggtgccagcagtcagacacccatcgaactgtttcctaagaggagaactggcatgactcacttttgatctgtcagctttgtattgatttttctggcaaactttgtaggtctgcccagggttgactccaccaggagcggctacgttgtaacccactgcgtccagagtcagtcattacaaaggccaccatcacaggatcggattctgcatttctttttgtgggaatgtgggaggagaggagggaaaccacaatccacaaaaccaagggtgtccctgggcttccccactgcctgctgaagggaagccaggcagctctctacatgcctgtcctgggctagggactgagggctacttttggaaagagggactgatgggagctgacagaggcccagaggcaaaccatttccaccctgtcctttcctctacactgggaaccggggagccagcgattggaggctcagaaggaggatggtgaggttttatgcacagtttaaatatattgctatgtaattttccaattttaaaacatgagatcactgattattcagtagcttccccatttttttacaaagccctcctgtgtgtatgtttgtgtgtgcgtgtgtgtgtttaaagccttttcagtcaaactgagatatcctaccgaccttcccattgttcctgagcccccatgagaatgtgtagatgtgtgtcagagctttagagcctgcaaggagctcccgagtctgaggactcacttgtgctgatatttcagggaagagcttgatgcctagaaactggaatgtgcagatgttgcatattcagagactgaagtgctggcctcagcaaacaatgccaggagaagaaccaagaggtggaaccacgtcaaccaggagccattgtttcgctgagggcaaagccatttgccaggccctgtgctggctgccctagccctcagtgcctcccctcaactttcctgtgggtgccctcaggtgaaacggcccctcagacagcccctcaggagcaggtttgacatgtcactgagagatgcatatgtgtgtgtgtgccggtgtgcatgtgtgtatctatgtgtgtgtatgtgggtctctgtgtgagtctctgtgtgtgtgtgtgtgtgtgtgtccattatgtctgtgtgcctggatgtctgtgtgtttctgtgtggccatatggatgtctatgagtcttgtgtgtatctgtgtgtgcatgtgtatatgtgtctgtgtgtgaatctctgtgtccacgtgtctgagtgtatgcatgtgggtgtgtctgtgcatctgtgtgtgtctgtgaacatgggggtggaatggaaggggacagcctcacccgtggggagaaggggatggaaacagctgctctccagggctcctggtagacatcacttccacagagaggctttctctgcactccttccaatttaaattctgctttctgccagccaatatctctccctcgtgttgtctcactgcatccaatgcttttccttcttagctgttattgtaatttgtcatttttatttattgggtgatgtctgtcacccccgctagtctggaagctccatggatacagggatattttatctccagtgcccaatacaatgcctggcacagaataaatgctgacaaataataaatgaaacgaggtcagaagggccttgtcattgcccttctggataaattgcgggtccctgtggagtcgatttgacctggtacatagctgcatcaagagtcaggagtttcagggcaccgacatccttagcaaagcctcccaggctggagacctgtgacatgctagccaggcactgccaccaacaatgagattggaagggacagctttcctgagaggcacatttctgaatgacatccagaactgaggaaagcttgccagatattcccctcaggtaatgactaatgcacgaaccagttcccaggtgaataatgtcaaaaggaatcactatataggcccccaatccctctgaggcagggttcagtggaaatcacacactattaggcatcagagcagtggtcaacacatgcgcacacagttgggtcggcaggtattactttatactagttagagggataggcttaacattaattaatgtctcattgctgatcctctagcaaaatctaaaccccaaacccaaacctgagcccttcatttaaatgtatcctctgtggccagctcagcacaatgaagtctgcataccgattcagccctgtggttcactggctggatctcaaatgaagctggcagcgcatgtgctggtgtgggaagaagagcttgcagtgtgcatttgtcatctgccatgcactagcagtgagatattgggcacaacacggcacctctctagccttcagggaagaggtgacgcctgagctaggacttgcagggagaggagggatatcagagggaggatgtgcgtactgattcctgggggcaggaccagggatagctgctgccagcatcaaatctgctccagcgggccagtctagccccaaagggataaaggagttgagggtaggctgctcctggggccctcctgagaggcacagacggacaaaaggttggggactgggagatggcaggaatccagaccgagagtgtgaccagaggccctgagagccccggacacaggcagggcctttcagctccagctccagctcctgggctggcagtcttaaggcaaatttctcccatttccattttttaaaaatttattttctaaattttaattgtgataaaatagcagaaaatttactattttaagtgtctagtttgttggcattaagtacattcgcattattgtgcaaccatcaccaccatccaattccagaacccttttcatcttgcaaaacaaaaactctgtgcccagtaaacaatagttcctcattccccaatcccctgtccctggttcagttttctattcaattttattacataagcacgtgtgtgtgtgtgtgtgtgtgtaccattaaccagtggtacagtgcaaaaaacttacataaatcttcattaaaattctaggtcagacatttactactgtgagaattcggttaagtaacatctttctgaacatttgtcttctcagctaaaatctaaggaggaggatgatgatgttaatagctaacattcactaggcacatgtccgtgcatttccctttctcaaaaaccctataaaataggttctagtataattttcactggtacatgaggaatcggaagcacagagatgtatcccaaggccacatttaacatctaccttagagagaaggtcactgtgaagaaagtgccaggtacagagcccatgctcaaaaatgagggttcccgttgcctttttcaggagtccttaccaggtgtggtttatatagtctgtgtacggagcatcctttgtgcagcaatgagtctagagtcattgcattttagtcttcaccacaacactagaaggtagatattttaaatgtagtttcaaaatgtgttaatttgtaattccacgatagttgaaatcaaagaaatcaaaccttacagggagaactcaaaattcacatgactaccgccctctaaactcagtccctgctccagagtaactactcttattgcactagtgtactgtatgtcttcccagacctttctatgaatagacacatctttatacccggagaattgaaaaatgcttttgcagcttgctctgttctggaaacttctcaatatcactcagagatatttttccatatcagttcataaaaatcaacctcattctttttcactgcacagtgtggttgtatcaaagtttatttagccacctccttctgatgatcagttactgaggtgggcaatatcttcctttgggcctgggtaccttttccaaggccatctgactggcaagtggcagagctgggttctagccccctcgtttctggctccaaacccaacagccatcaccattatagtataaatcagcacaaacataaagtctgttttcaagtcagatggaaactcagtagttactgactacatttatttgttcaatgctcacttatttattgagcatccactatgtactataaccagtggtggagaatctccaccttgaagtgtctcccctcttggcttccaactccatctcatgcctcctggcttgttgtcaaatttgctggccatccctcttgctccactgccccctaaaattttatctttgttccctttttgtttcctcacttggcacagctcccgtgggcctttccatccatgcctctgattactaagtcttcatttccaggtctccctctctcattcagctccagacccatgtttccagctgcccccaggatacctgctcctgcatatcccatagccatctaaaattcaacatgtccaattctggactcattctcgcatccctaaaacccactcctattccaataaacggcatcactgctttggggcggcccaagttgagtctgcagggctaacttcatcttctcactcttctttgtcccacaaattcatttagtgaaccagctccattggctcaatttcctaaatagttctgggatctgccctctcttctctaacaccactgccctatcataattcaagcccccagcccctctccctgaactagaacaaaagccttcccctctccaattctccaagctcccaaagcacctcatccattcctgttatccctcatctcagcactcggaacttacaggtctatgtctggtcgaggcatgggccatagtccaatcatcttaatatctctggtacataattgtttagacacagttttcctgaatgtttgctgaagaaatgttagcaccaatggcacttccagaaatgctagataaaaccaccaaggtgcgttatttcaggccctcaccttttacattatggttttagggaaagtgtaggaataaggacagagcagaatgtctgttcctacatctgcatgtgtgctgaagctgactgagcacttcttactgttaaactcgttcctcagtgttgcggcttagcagcattacgaataatatcatttccactatctctgtgtggtagctgttggtctgtcattcacccttgatttttgcattgtaattgcacatataacaaatgtataaaataaagaactagaactggtagcaaaaagatatattattgcatttactgtgctgcttgcaagtatgtttttatcttctcaacacctcaactgaggattgtatgtattctataaagcactttttagtactgtggttgggtcctcacagtgcaggaagtcctgagactattaagatatccctcaatattcacacagatttttgtaccaacgaccacagaattataggaataaaaattaaactggctcttagctaaagcaaaaaaaaaaaacaacaaaaaacccagactctgtttttctcatttttgtaaagcagatgtgaggcatctgtctgttttgtgtgaattaaacggtctagacatgctttctaaagaactccagagatgtgactattttcattccataagacaatagagaaactcatgtctctccctttagaaactggggtatattctttcaggcctgacaatgtagttgaattcaggaaatacagcagtatttgccacctaaattttcactttcaattggataattatttgttcaaggccaaaataaatgcttcccaagctttcagggtattggctattgagtaatctaactcaggtttgggcgataacaggtatgattttgtgaatggcagtttgtttccagtgcatttctctgcctgtatctatgttcatgagtttgcttgtcttcccaaccacccttccagcaaacactgaatgatagtggcaacatagtgatgagcaagatagacacaatctgtgtcctcatggaggccagcaaaggcatttagtagttaaaaattgggtttctaaggcttcttaaccataggctgggcatggtggctcatgcctctattcccagcactttgggaggccaagatgggcggatcagttgaggtcaggagtttgagaccagcctaggcaatatggcgaaacactgtctctactaaaaatgcaaaaattagccgggcatggtggcacgtgcctgtaatcccagctattcgggtgactgaggcaggaaaatcgcttgaacctaggaggcggagattgcaatgagccgagatcacaccactgcatatttcaaatgtagttttaaagtgtgttaatttgtaattccacaatagttgaagacatgcatcataagaaatcaaaccagggcgacagagcaagactatgtctctaaataaataaataagtaaataaataaataagatttcttaaccatttgcttagatccaaaatttaaatcacgtttattttacctatggttcctccacccatcatttgacaaacgtttattcagcattactttgtcagggcctgtgctggtgctacagagatgaggaaaacgtgggcacagtcctggccctcaggcagcttacagtcagcagagaagacagaagagtaagtagataccataatgcaatacagaaagtgcggtgacagtgatctatatctgggtatacagaggaggtgtccctgagctaagctgaaaggatgagtaagacttggttgcctcaatttcaggagggtgggcaggagctaggcagatgtaggtcacttaaaggaatgtcaagagatgaggagagggaggtggggccctggtcagagaggctttaatgacccttatcctgcatgtgatggaaattcactgcatcctggattcacatgctggcagatggagcagggtgagatcgactgaggaggaacaagcctggcacagagcccagttaaggggctgctgtgatattctggcaggagacaatgaggcctgaagggtagtggaggtagaatagaggacacagatttgggaacatcttggaagactgaactggcagaggtagaatggcatggggtgaaagacaatgaagatttaagggggactcccgggtttctagcattagtgattggatggaagatggtggcaccaactgggcagaaaatacaaggggaatggcgtttggtcatgttgaacttgaggtacgtgtgggacattaaaaatgcagatgtgaagttttaaggagaagtttgggtcaaaggcagtaatttgggaatcatttgcacatgagttactaaactgagtttgagccaccagtaaatattaaaaacatcacaaaagatgggcctgcaggagttacccctgtgtttactctgagaatagtgataattgaatattgctgttgaattcaattttgatggcatgcttccctatgggtgccattagagagacacttcttatcttggtactaagaatagttggctttcttctgagcaacagagtatacttttatcttttgttttctgtagttcaaaaacttttatttttatgattataatatagcttaatacaatgtattcattttttaaagcgtacagttccacggtttttaatatattcagagttctgcaaccatcacataatcaattttagaacaatttcatcacctcccccaaaaatcctgtccccattattttattcctttttattgctaaatcatattccccagaatggatatacatttcatttatccattcatcagctgatggatgcgtttagctaatagactgtcactgtcaaatagaaatgtcacgcaaactacaaatgtgagctacatatataattttatattttctagtagccacattttttaaaagtaaaagaaaaacagatgaaattaattttaataatatatttccaccaaacatatccaaaatattattatttcaacacataataaatataaaagattattgagatattttactttttttgtatttttttgtattttcacagtaaaatatcgtatgtcatatcttttctcatttgttcttaatttagctattttattatgttttatgcatccttctttgtaaattgccttaattaaaaatggaaaatgctgatggcctcaagaagaaaactgctgacaaaaagaagataagcttttcactcggagcatgcagatagtgaactgatttgaggaactgaatataaacctgtctcctcagaagctgttgccaactctctacctacctctctctgcccctttttccccaacacctaacctcagcaagcctctgcagacatcactatttctagatatttattaaacagtagaattgagtacagccgagtgtgaccagtatctaaaggcaccagaaaataggctagctccaactggtgttaatttatctggaaaacattcagtgatttgggaaaacaaaaacaaaaacagaccacatgattccatgacctctcctaaactgcagggcagagagagtaagcaagacaaactaccctcactgctttaattgtgtaatgaactttctcagacaccgaaaggtatgctagacattctttctcatctctgtctttatatatgctttgccctcctcaaagtgcctttctccctttcctgccttacatgcctcaagactcagttcaaatatctcattagtgaagacttcctctattcctactcctgcagggctttgtttacatctttcttattgcaatgaccacacgtgggtgtccatgcctgtaccaggctataagcaccagctcttgggtaggaacaaagctgcctttatttctgtatttcacacttagcttagacactggcacacagttggtgcttaatagatgcttgttgatgagtaaagaaagtgcaagtcatgggtactcatgggtgccaggtagtgtttgaagggttttctgtgcatctctcatttacttttcataaccctctgaggttgtctctgcttgataaagaaggtaagacttctgatcattagagaaatgcaaatcaaaaccactgagataccatctcacatcaggcagaatggctattactaaaaagtcaaaaaataacagatgctggtgaggttgcggagaaaagggaatgcttatatactgttggtgagagtgtaaattagttcaaccattgtggaaagagctaaaaatagaactactatttgacccagcaatcccattactgggtttatatgcagaggaatataaatcattctaccataaagacatatgcacgcaaatgttcattgctgcatcactcacaatagcaaggacatggattcaacctaaatgcccaccaatgacagactggacaaagaaaatacagtatatatacaccatagaataccatgcagccataaaaaagaatgagataatgtcttttgtgaggacatggatggagttggaagccattatcgttagcaaacaaacacaggaacagaaaaccaaataccacatgttcttgcttataagggggagctgaatgatgagaacacatggacacatagaggcgaacaacacacactggcgcctacttcagggtggagggtggcaagagggagaggaacacgaaaaataactattgggtactaggcttagtacctgaatgatgaaataatctgtacaacaaacccccatgacatatggatttacctatgtaacaaaccttcacatgtgtccccaaacctaaaatagaaggttaaaaaaagaaggtgagacttataaaaaggattaaggaactcactcatggccatgcagtaagttaggcagcagagcttcaaagatacctacctttgaggacttccaatctgtaaaagatataatctttcttatatttttataacaacctcaagaactaaggaaatgaattgacttctaattggacagagtaaggataggccttttctgtcagaagaaattgttttctctcaggcaagttagaaaagaataccacagacaaatattgcatgtatttgtatatatcgtattgcatatatactatatatatatatagtatctatatattgcaatactatatatagtatctatatattgcaatactatatatagtatctatatattgcaatactatatatagtatctgtatattgcaatactatatatagtatctatatattgcaatactatatatagtatctatatattgcaatacattatgttgcatgtatttgtatatatttgtaaaatatatacaatattatatatatgtttgctatcattgctgtggatgaatgtcagggaactgagcaaggcaccaggattcattgaacaagattaaaaaactagcaacccattagattactctgaaattgaaataattttacattaagaactttgtatgtaactaacctgcacattgtgcacatgtaccctaaaacttaaagtataataataataataataataataataataaagcaatataaactgaaaaaaaaaaagaactttaaaaacattctgcttggacttttttgactgcctgacacattcaaattcaaatcaaactccaaatcactacttacttgttaaagcaattaatttactctcagaatcaaaaagctttgctgaaacttttaaaggtccatttcattcattcattactatcaggctgtaatatcacatataatttttaaagatgacatgctaagcatgcaaactgatttatggtcgtcagctggtgtgcttttaaaataaactcctatatactttatggaaggacaacagagaaggaattcatgaatttgcacactgattgattaataatgaaacaattccacatttcagattcctccatgtaccttgtttttccttgacatcaaagacttctgttccaagtgctattacgtcttttcattcaaatgttttgccaagaatattttctttccaaatgggaaagaaagctgtcatagaataagtggaaaggctgaaaaatgcgcaggtgcaggagtgccctatctaacatggtcggtatacactgaacatcagggaatatttaaaagctcagtgctttagtatcaggttttatttagcttccactcaactaattacagttcaccttggacattctataaaaatttaaaagacaactagttgcttggtttaaacataggcaggcactggattttctaccagaaaaattttgaactgattaattcttagtgctctctcataaaatgacatagactcacttttctgttgaggaaacatggggtatgacatagatttgtaatttttggttaaaatgtcatttgtatcatgctaaaaactatttttctttgctctcatcttttttttccttcatatccttctctttctatagaaaacattaagtaacttatgaattgaatagtaaaaatggaaaaatacagagaggtagatttttttataagaaattctttctgatgtgttggctgacctgggactgaaaggtgcttgcctggtaagcttgaatcagtttttgtgttaatgtgatttgaaaacaggttgtgaggacaggaggtgtgagggccaaaggtactgtgatgttctctatcttggctccttccagaagaagaagaagagaagttatctcagtctctgggaaccttatattctagagttccctttcctcctggatggtaatattcccatacagaagattccagcaattgaactacaactcaccttgatacatattgccatatttgacactcacaagaactctgtgagaagatacacagattacacatggttgatcagatgttttttagtggaagaacccatgcctccagatagttcctttaaaaaggtattttcagttgttataaatataggatcagagaaatgtagatatatacagcatagaatcctacaaactattaaaacataaatttaattttgaacttcctgggaccaaagcaaattgaggccaagtcaatgacatggttcatatttgtaaggaccaagaacgatgaaacttcagtgaaccaaaactttaagaacataaatttgatatttcctgatgggtcatcacaaatggggcaacttatgctggccttaacaatatccttacaataatcatcttaaagaggagggggaaagtttagcataacataatgttatgatttggatgtgtttgttcctgccaaaactcatgttgaaatttaattgccaatgtaccagtggtgggaggaggtgcctttaggaggtgattaggatgttaaaatagattaatgcctttctcttgatactgcgttagttctccggaaatggattggtctctgagtgaatgggctattctaaagaaagatgtcctctcatatttaccccttttcaaacacactcgctttcccttttgtttctccgccacactgtgacacagtatgaggctctcaccagaagccaaccagatgccagcatcatggttcttgacgttcccagcctctagagtcataaacccaataaaactcttttctttaaattacccagtctcaggtattcaataaattacccagtctcaaccattatagcaacacaaaatggactaagatatacaactttctttcctccgtgtatagagaatactttaaaaaattgagcatgatagattctcctcagtgcaaatcaccaccagagagtaggtcaggcccttacgagaaggcctaactgggttctaggtgactctaattcactttcgaagtaacaatcagcttgcttatcaaggaacagagcccccttcttcattcttgcaaaaacatggcactaaactaaaaagagttaaaagtttgttttttaatttagtatttacgtgtcatatgtcaagaactttgctaaatattgtacatgtcctagaacatttgatcttcccaattgctgtattacagatgaagatattgaaacacagaatgattaaatggttatttctgcccaagacaacaaaagtgcaaaagaacaactgggatttgaacccagatcatttaatttctgatgccaggctccttccgccatgctgattaatgtttctctaaagcaatcattatcaaagaaagactgataagagagaatataatacattatcatttacaacaaaacatagatttcaaggcacaagaacgccacgtatatcctaaaataataaaagaaaaaaatcttgtacgactcatcttggaagcttgaatgcatgcaccctgcatcctttttctacatgtaggaaggatgccatttcagaaaatatagattccactgaaatgtgaaagaggtaaagtcatccaacaacagtcctaagttgtaactgaagagccatcagcaagcaggctcagcaaccctaacattctaaagctagacctcctgtttattaggctatgtggtctagcggaaatgcaaagattttagagacagatgggagtgtaaggccactactggcattaactagctgtgtgacctcatttaatctctctaattctttcttttcagtcctccctttctttttcaccaaagggaatatgcatcttcttgtggaggtttgagatggtgtatcaaaaatgcatgggttagtagatgctcacaaaattattattattgttgttatggtgattatgtggatgccaaggagaaagacagcctgtatgattaatgacaatttttttttgtttgagctcatggcgttcaatgaaactttaataccaaattatatctaatatactggcatgcattgtggggaaacaagatggataaacaccaagtctctgccgtcaggaactttacaacccataaataaaataatgatatagagagtttggaagcagttcagtttgttggcggaaagggctcaaataaaacaataatggagataaggtcataaacgtcacttgaggcctgttgcaggtcttgaatgccaggagacagagttcattctcaacttggcaaaattctgtgagcagaaaagcaattaaaaaatcctaatttttatttaggtagctttatcaagtgaagaaagtggtggcaaagagtctgactaatgatgtggtccagtgtgagaagagcatgaagtaggaattgtttttccaagattggtggaagaattgagctggttctctgcttcccctcttggagtctttctgggaccccaaaaggaagtagaaggtagttggctgaggttgaaggtggtttgtatggaacagggcaaaactgactgactccctggaagtcaccactcagtggcatcagactgcccgaccagggtctgtaaaacttccttgggtccaggtcccatcatgttgcccaaacggcaaagaaaaatagttctcattagattccagattcctagtctttcaggccaaaaaaaaaaaaacaaaaaaaaaaaccctggtactccaaaattgcattttgatgaaatatctaattaaatgcctatgcctaataatggtttagtaatgcgatataactccaattatttttctttaatgatgttctacttagaatgttattagcattttcaggatttattttaatcattaatctttaacatacaggataggaaatgaaaatagcaatcctattgaatgctaatcagtaatttgaaaagatttcctgtgactaagttaaaaaacatcttattaatgtattatataatttgttacagaactgcacatccttcagtgagtagagcatgattttgaacactggggaggtgattcagtaaataagcggaggaaaaatataacagcggtaagtaatgtatttaaggttgttcatcaaagtgtctgacatatagtaagtgccccgaataacaggtgttattattttgaaatccatttgaatacactttcttctccaatttgtatttgccaaattagttcatactttgaacataaaactatttctgctaaaataagctaagtgtattttaagtctgtagaaatgagtcatctaagttcattacaccaaagaaaaaactttatcatctacaggacaatatatacaatgatactagcttttcagcaagatgaaaccctgattcactagcttcagttacattcacgatactgtatttattaaaggatgaggtgtgcagaaaagtacacttacctatttttggaaagttcccagcaaccaggttaaaataggtttcttcttaaactcattaaaataactagaaaactgtctttcctaagcatcatgattaatcaaggcttaactagacttgaagatttttttttttttttttttttgagacaaagccttactctgttgcccaggctggggtgcagtggtgtgatctcagctcactgcaacctccgccttccaggttcaagcgattctcctcccttagcctcccaagtagctgggattacaggcgcctgctaccacgatcagctaatttttgtatttttagtagagacagggtttcaccatgttggtcaggctggtcttgaactcttgacctcaagtgatctgctggcctcagcctcccaaagtgctgggattacaggcatgagccaccaagcctggcctagacttgatttctttcttgttttttttttttttttttttttttcgagacagagtctcgctctgtcacccaggctggagcgcagtggtgtgatcttggcccactgcaaccttctgcctcctgggttcaagtgattctcctgcctcagcctcctgagtagctgggattacgggcatgtgccaccacgcccagctaatttttgtattttcagtagagatggggtttcaccatattagtcaggctggtctcgaactcctgaccttgtgatctgcctgcctcggcctcccaaagtgctgggattacaggtgtgagccactgcacccaggcagatttctttcatggcttgtgattcttcaaaacatatcttaaattcctttgactggtaggggcaaagagtaagaagataggaaaaatttaaaagtaggtcatcctaaaatgttttggagtttcctagggctctaaaataaaacaatgcccattcctcttaattctcttaaatatatgtgtgtatttgtgtacatacacttaaatagacatagatataataggatataaagtctaactgcagaaaattgcaatgtgagtggaacacttgacatattaaaaggaggactctcgagattgaattaagagtggttaacaggcctcgctgagttaatttgcatacattttctaatttagcaaactgaagagaaatcatcttcataggtttcttgtccatgtcatgtaggtggttttgcttggatgacagcaaatcagtcatttgattccatcaaatcaggcaagatatcgaacaggttagtaaaaagaaaaataattaggaaaagaaaaaagggcagggtgtttcagttgatcaactcacacaactgtccccaacagactccagtatagatttgctgaagcatatattgtaaattcagttcttcattttttaataatctttgtatgtttcatacttatcgttctttttataatcttataatttgtatccaattatacaatttattattatttgtaagggctcaacagggtagagacaaatgacactttgaggcattacctagggtacaaataccatttttaaaaaggaatggaagctttccagagacaatataccttctgtgacagacattagtgaactcatcagcttttcctgttctctcccctccagctacgtggtgatgctactcttcctgactccctcgaagttaggagtgtccatgtgactaattctgaatactgggttgtggccaaccagacatgtatcactactggctggagctagtatgaaactctccagctccccttctccttattgtggtgaccacagatatctcagatggttgaggccctgtcagcaggtccctgggtgtggatgataggagcagggcgccctgccaaactggggtgggcctggagcaagagtgaggaataacctgtattatgtgaagccgctgaagggtgagggttgtcagcactgcataatctagcctgtcctaactaatatacgtcccttgcttggaaaatgcagagtccaggtcatgagttttaacaaagatacagaaacgaaatatgctgggtggcacagtgaaatttatttgtctttatgatttacacataataattaaacacacaaaagaaaaaacactgtcaagatggccatatgtagcttaggaaatgactggtcccaatgcaatcatataaatgttcattcagcgtaaaaatgagtttctttttaatggttttaatcttttttttttcagtccccaaggcttgtaccactcagtacaaatgtttttgctactgggttatcatcaggaacatgatgtttaccaattcccaggaaatgaataaaatcaacagaaacatcctgtgacaacagagcacattttcatagaaatgaaattgatgagcttattacagtttgaatcagttcagctattagatctacacataaaacatgaaacaatattaacaaattacatttgtattaagtttttatttaaaaatatttatcacacttttttgtgcaagggttccattgatttctttggttttaaacacgatagatctattttacctaaatatatatagttctatttgtaccaaacatcaaaaatcaaaaaaacaaaatttcaaagggtaaaaatggaattattgcttcaatataaaaaaggcctagcccatttgagaactactgccattattgctttcctatttgaaaaactatcctggaaatcaaggaatgtaccccatagctccctgcagaaagtataaattggttgcacattatcatcatattaatatgaccctaccttcaccaaagctatcctgatcttgtccttaaaaaatgaaacaaagcaaaatagcataaataaataagtttacctaaggggatacaataaatagcctagtatactagataggaataaagaatattgtaacataaagcccttcagtgctgtacaatgcaacaatagctttggattttcaaggtttagagaccttgaaaatccatttcataacagttttattactggtatgcagctgacagaacaagagaatacacttcttttgttctcctcatcttagagtgaatgcacagcagatacaactgtcaattctgccttttgggaatttacctgggcatgtaccattgtcactttttgacctctgcctaattgtagggcaaaatcttaggattaaaaatatccaaatattccttcaattcctagtggtttcttggtctccagaatagttaaaaacagagaggaaattagactcaaaagttttgctgccttcttttctttgcatccatcgcatccagaatgggctgtcttttcgcagtgtatctctgacgaagttcttctatctcccgttccatcatggggtccagtgcttttaaccgcatctgtagttcttctaaacttagatttttcaactagatacagaaagaaagataccaatacaatgaaattatccacattatccacaatcaatacaatgaaattagactttaatgtctaatgagttttaacataaatatttcagcaaattctttacatcatctttgaagtatagttcaacaattaaaacaggaatttcttccttgaagaactcagaggtcatatcttgcaagaacctccagtaatctgcaatgaagcaatccgatcctctgcctttaataaagggcaaatgagaaaaatacgctgatggaatttgtaaaaaggtacaaagacaaatccaccactgccaacaaacagattttcagaatatgttccaggtatattcactctaactttttacatctttgccagctactgagtgctacaataatcatgaacacttgcagagatcactcaagaatgtgacaagactgaataaaggttaaattaaccattctatcctccattttactaaatgcttaataaagaagatgactgtggtagggggcgggaagtaaggctgaataggcctggtggggccccaaaagcaggaagccatgatcaattctggagtaggacagttatgtaagagtaatccagatttggttttcttttcttcttcttcttcttcttattttttttgacacaaggtctcaaacttctgggctcaagagatcctcctgccttgacctcctcagtagctgggatgtgccactgcacccagctcaggcttggttttaaaatgataaaacttgcaacttactttttgttttaagaagataattgcctttggttattttatgagtcaagctaggaaaaatactcattacttatagtcatccaaagtagcatttctcagcagatccttttactcgccatccctggccctatcgtgacttctgcttccaaaaaccaaattcactcttagctgaaaaagactctgaggatactgaaaagaatgagtcatagactctctgaaggaaattcaaaaaaggagttccaaaaatattttgagaaatgacagtgttatggagaagagtatgcaggcttccatgatgatgactttgaaggtgaatgccactcacttcggtgcataagaagttctggtatgtatattaataatcagccctgttattttgtagtcatatgtcatgaaagaacctagcttttaatattatgccataaaacatacatttatatatcatatgtagtattatacactttcttcattgatttttaatccaagtagtgatcttgcatctgttacatgctcagtgctgttcaaatcactgtggagatacagaataagacaaacagggaaactccaaactttgaactgtacacatcggtaatggccacattgaaaggccaatgtataccacacaaccacatttcccaagaaagacatgcccaactatgtctatgtaggatccagttccacttctgtgttcttcaacatcatctctatttcagcccatgttaatctttcccatttctaaatttctatgtaacactcataatttaaacaacacaatttagtatttgattctaaatcatgtactattttataattgatttttatgcatgagtttcatgtccctagatattccaaaaaatacttagactttagagactgtacatacaccaagaaactatcctactatactgcaaataacatgacgtaaacgtagatagataaatatgaataagaatatatgacccaaaggagtgggttactctaagatcagaagaactaacatattatataaagcaaacaattatcattactttaattctgaattaagatattcctgtaaatatcttgtactacttttactggggcaaactgccaataggtttataaatattgtattgcagtaatagactgaactcagaaaaagaagctacttagaagaaaaattttcttcctttaacagatttttatattatcaatgcgtaaaatttgtgaaaaacaggtctgtgatattagagaaacattatctaacattattaaggaattaggtgttcatgtaagtaaattaatgaagtacctaaatcttagttctttaagtgataaaactttgtctcaatatcacatacacacacatatacacacacacacacacacacatgtgcacacacacatgtatttacatatgctcttttttggttctatgtgacttttaggatttttttctaattttgtgaaaaatgatgttggtattttgataggaaatgcactgaatctgtagactgctttgggcagtaaggtctttttcataatattgattcttccaatccatgagcatgggatgtatttccatttgtgtcatgcatgatttctttcaacagtgttttgtagttctccctgtagggatcttttaccttcttggctaagtatattcctaggtaatttattgctattactattattattattaattattttacagctattgtaaaaggggttgagttcttgatttgattctcagcttggtcactgttggtatataatagtgctactgatttgtaccactgattttgtaacctaagactttactgatatggtttggctgtgtccccacccaaatctcatcatgaattgtaatcctcataatccccatgtgtctagggagacacctggtgggaggtgattggatcatgggggcagtttccctccatgctgttctagtgatagtgagtgagttctcacaatatctgatggttttataaggggcccttccttcttcaatctcactctgctctcccctctcaccacgtgagaaggtccaggcttgcttcaccttcaccttccaccatgattgtaaatttcctgaggcctccccagtcacatggaactgtgaatcaatacacctctttcctttgtaaattacccagtcttgggtatttctttatagtagtgtgaaaatggactaacacagttaactggcactgaggtagtggggcgctgctataaagatacttgaaatgtggaagcaactttggaactgggtaatgggcagaggttggaatagtttggagggctcagaagaagttaagaagatgtgggaaagtttggaacttcctagagacttgttgaatggttttggccaaaatgctgttagtgatatggacaatgaagccgtggctgaagtggtctcagacgaacatgagaaactcactggcaactggagcaaagatcactcttgctatgctttagcaaagggactggtggcattttgcccctgccctagagatctgtgaaactttgaacttgaaagagatgatagggtatctgggggaataaatttctaagcagcaaagtgttcaagatgtgacatgggtgctcttaaaagcattcagttttatggattcacaaatagatggtttgaaattggaacttatgtttaaaagggaagcagagcataaaagtttggaaaatttgcagcctgatgatgtgatggaaaagaaaaacctgttttctgggggagaaattcgagcctgcagcagaaatctgcgttaagtaataaggagccgagacaatggggaaaatgtctccagggcatgtcagagatcttgccagcagccccatttcatcacaggcatggaggcctaggaggaaaattagtttcatgggccaggcccaggggccctgctactctgtgcagccttgagacatggcaccctgcatcccagccatttcagttccagtcatggctaaaaggggccaaggtacagctcgggccatggcttcagctcaagccttggtggcttccacatggtgttgggcctgcgagtgcacagaagtcaagaattgaggcttgggaacctctacctagacttcagaggatgtaatggaaatgactggatgtccagtcagaagtttgctgcaggagcagagccctcaaagagaacttctggtagggcagtgtggaagggaaatgtggggttggagaccccataaagagtccccactggggtgctccctagtggagctgtgagaagacagccactctcctccagaacacagaatggtagatccattgacagcttgcaccatatgcctggaaaagctgcagacactcaataccagcctgtgaaagcagctgagaggagggctgtaacctgcaaagccacaggggtagtgctacccaagaccatgggagcccacctcttgcatcaatgtgacccggatgtgagacatggagtcaaaggagatcattttggaactttaaaatttaatggctaccctgctgggtttcagatttgcatggggcctttagcccctttgttttggccaatttctcccatttggaataagagcatttatccaatgcctgtacccccattgtgtcttggaagtcactaacttgcttttgattttataggctcttaggtggaagggacttgccttgtctcagattagactttggacttggacttttgggttaatgctggaatgagttaacacgttggggaactattgaaaaggcatgattgtattttgaaacgtaaggacatgagatttgggaggagccaggggcagaatgatatggtttggctgtgtccccactcaaatctcatcttgaagtgtaatctccataatcttggtttgtaatccccatgtgtctagagagagacctggtgggaggtgactggatcatgggggcagtttcctccatgctgttctcatgataatgagtgaattctcacaagatctgatgggtttatgaggggctctttctccttcactctctactctctcctgccaccatgtaagaaggtccaagcttgcttcaccttcaccatctgccatgattataagtttcctgaggcctccccaggcacgcagaactatgaatcaactcgatttttaaaaacatattgagacttgttttaggcctatcatatggtttatcttggagaatgtttaattttggataagaagaatgtatattctgcaattcttgggtagaatgttctgtaaatatttgttatgtccatttgttctacagtgaagtttaagtcctgtcttcattgactttctgcctcgatgatctgtctagtgctgccagtggagtggtgaagtcccccactattactgggttgcacctatctcttttcttagatttaagagtaattgttttatgaatctcagagctcaagagttaggtgcatatttatttaggactatatcttcttgttggattgatccttttatcattacataatgtcattctttgtcttttttttttactgatgttgctttaaattctgttttatctgaaataagaatagctacccctgctcacttttactttccatttgcatagaatatcttcttctacccctttgagtctatacaaatccttatgtgttgggtaagtctcttgaagacagcagatatgtggtttgtaattttttatcaattctgccaaccagtatcttttaagtggagcatttagaccatttacattcaacattaatactgaaatgtgaggtactgttccagtcatcacgttggttgttttctagatactctgttttcttcattgtgttattgtattacaggccttgtgagttttacgctttcaagaggttctattctggtgcatatctacctttcgtttcatgattcagaactccttttagcatttctcgtagggatgctctggtagtgacaaattctctcagcatttgcttgtctgaaaaagaatttatttctccttcatttatggaacagttttgctggatacaaaattcttagttaacggttttctgtttaaggaggttaaagataggaccccagtcccttctggcttgtaaggtttgtgctgagaaatctgctgttagtctgataggttttcctttacaggttacataacgcttttgtctcactgctcttggtgacatcttttttgcaacgaatctcctagaagttcttttttaattaaaacactttttttttttgtgggtgcataccgggtacctgaaatgttttgatactggcatgcaattgtgaaataagcacctcattgagaatggggtatccatcccctcaagcatttatcctttgaatacgatccaataacactcttcaagttattttaaaatgtacaattaagttattattaactatagtaaccctgttgtgctatcaaatagtaggtcttattcattctttttattttttattttttttgacagagtctactctgtcacgcaagctggagtgcagtggtgtgatctcggctcaccgcaactgatgagaaagcaaaaaatgtccatcaaaatatgaatggataaagaaaatatggtacatatacacaatggagtacattcgtgtgccatatctgtttctactcatgctgttttccttctctatcctatttcccattttatcatcttactcatccttcagtgagttagctgtgcatgggcctatcttgccagctagattgcaatcttgttgtgggagatagagtgttttactcatctccgaacctactatgctgtatttattttaaaaatatctgatttcagttttgtggttgtatgaggttgagtttacaggaaatctgacttctgcataagctacatatatcgctaggtcttcaggtgggctgtcagagaacttcaaagtactcactgacatatttattgagatttttctatggaccaagcatagtagaatgaattttcattcacatcttgaatagtttttcaaacttctttatgttgtttttcacctttctctcgtatctcctttggtagcttaataatcaaccttttgaattctttataaaaagatatttcaaagatttcatcttggtttagatcaattgctggagagctaatgtgatcttttcaggggtgttatagaaccctgttatgtcatattgccagaattgtttttctggttccttctcatttaggtagaaatatatggaatgcttcacgaatttgcatgtgagccttgcacaggggccatgctaatcttcactgtatcattccaattttagtatatgtgctgctgaagtgagcaccgtctcaattgttttgaacagaaaatctttataaagtgttccacagaatatactgccttctaagcagaggacatagaacctaaaacagtttccttgatatgagttatcattatttttattatggatggatgaatattgtttttagttaaattaaaaagtcaaaactactttttaatatgagtcaacactttgtttgtaaattgatatggtttggtacatgagtgacagcttaaataagaaattcattttgttagtgatagcccttgataattacatttcattcaggagatgaaagatcaatatacaaaactatgacatttctcagtatttctaaaaaaaaaaccaagtaaaagatacgcaaattaataactcagttactagctcttgtataaaacaggagcataaaaaactcagtgatatgagaagttagggtggaaaataagattaaatcaattcactgataattctgacatttcaaacctttaataattagaattatttctgaactctacaagaagtattgaaagtctgcttattactgatcagaaagagttgtcagtaaaattagaacttcctttaagtttacatatctagtctactataaaaacctaaaatatcacagtcaagtgataaaacttacttcataaaataattcatcttaaaatctctggggaaaaacactaagatttctatataattttgttttgtcaaaaatagtcgtaattacatgagcgatttttaagaagtcaaatctcaaatagcagaaacgggaatatgaaggttttgaatacatcaatgtaataacatttcaagacctaatgattctatgagttgctggaacaatcagtctgtcaaaataaatgagacactactacaatgaagcaaatggtcttacatgttaatgttaacacatttagtcaaacagtcaatcaagagaatcctaaggtttgctgtgtttactgggaaaacaaactcttcctagcaactgtttaaataaatcttgcagatgctacagaccttattagtggcctttgattaaaaaaatatgggttgctaatactgtatcctgactcatctattttcccatctgctagcaattctaacaatatgaactatcaacagaatggctaacaacaagaattttctatggcagttttgatgctgaattgcctatagcatttttaagatttaccagtgcatgtctcagactgttttgagtttcttgtggcctggagcaacatactcttttttcccttaatattccattttagctgaaatttttactgtgttgaacagaatcttgtttggttttagaaaacactgttgatggaggctgccacacatttaactaacaatgagaacaggaaacacaacaaagcactagtaaaaatccagtcaggtccactgattggtttagatatacataaacaggcaaggggccttttgcccataaggctgagccacagggataacaggtagtacttaaagttaaaaaaaaaaaaaaaaaaaaaaaagaaagaaagaaagaaaaaaaaagaaaagaaaacattcatatattaaggcattttcctgatttaattcctggcactgagaagcatacaaaaaaggagcattctagtcaatccaaactactatgaagcctgtttaaagaaaaccctacatatacatttaaaatatgcatttacaaaaataagatagtgataatttcaggcacttgataacactatagaagaaaagctgaattcctcactgtaaaaatgtgatcttaaaagctgcattaacatcaaatctactggcagaccccccttccccaaacagacattatttatcctgttctgagctgagaggcccaggtcttcagctgactgaataactaaaaatattctgggattacaattggaaactaccatgaatcattctgttttggctgtttaacttcagagcacctagaagaaacttaggattctagattttcattcccaaagaaaaggaagaatacggtttctcatgaatatcaatgaaggagtaggagaaagtgccaattactgattatttacaatgtgctgaatactatcctaaggtcctgtacactaagtcattgaagcctagcaatcaccttagggggcagatattaccaaccccgtttgacaggtgaggatgcttagagagatcaaatgatccaccctaggtctctcagctagaggtgcttatgtaggccctcaaaggcaacatctaacccacataaatttgaactgcagtctactgatagctgtttcatgggtttcccatgaactacaaaagcactacaaaatccaatgatcatgtgaaacagttttttcacaaattgtttataggttaaaaatagaaaaaattacttaaaaatcccaactttcctgtcagattgtacctggtgaagcattttacttataagctattcatgtattttagccatcactggccatatgaaataagtgcatatgtgttaattaagcatttttctatttaaccagctctttagccaaagaaacacatttctacatagccctttgggatagatttcctaatgttatcaataaatgtaacagagataccctgacaaaaccaataaaacatgtctccttcacattccagtgagactttgcctatgtctgttcagactgttccacagttggtttggtgctgtgtttaccttgaatctagtgcaggagttacaaactgatgagcattactataattatcttgtcttagagaaatctcggccacccatttaaaaaaggaatgatgaaattttcgttgcattcctcaatggcagctgagcacccatttcttatgtgcattttccgtttctggtaagtagctttgcttattaaaaatatcaggaaatacttaatttgggcacacttctgatatattgtaagcagctctaacattctaggcccaggacaacaaaatttaagtaactcaaaagcaaccagtaattaaatctttctggatctattaagggcagatgaaaaattgtattacctttgatttcttatctcagcgattctgattagcactttgaatagtttaaaacaccaatgaagccgtaaataagaggttaacaaattaagtgattaattttctttttatacttcaatttaagaaaaacattatatgagaaatatttgttatggaagatcacaaacattacaaaaacaacagtggttaaagtatatctgtaactagcttactgggtagtcaaacctctgtggagcaataatataaacttaaagtaatttaatttttctccaattacactctttcggctatgcaaagtcaaatttccttgacatatcccacagtaaatcttgggatgatttcactgatttctggtcacttttacttattaaaagtccagaccaaatataaacttcaatctcttattaagtgcaaattttgtcccttcccttagcatgagcttgcaccaatttacagtggggaaggatgatgtctatatctagaaccttctcgccgtctctttctaaggtctggttcctctagtgctgggagcaggaaggagaccggatgttattatgtaaatggtgacttgtcagtgaggtatgtttccctggtcttgctctggtttgtttgattactagtggtttgtgcacagaaagcgtgtgtatgtatttcctgatgttgtggttagtattatcctagtgcccaccccttttatagaggggctgcccaacatcttttctgagttagatattgtctcctctgacctgaaagccacctgggcagcattatgacttctgacctcctcttttggagtaaagagatcatggaagttctctacactctccagggactagtgggacccaaggaaggtaagggtcactactccaatggcccttagttatcccgcaggcctcggctctacctacagaagtctcctacctacaaaaatctttgggagagaagcagatatcagtgtctatgctaatataccttccaaacttccaggaactaaaggctctgcctttagtggcacaccagtgggtctacagattcagctagctcagtaagcaccttgctggggtaccaggtaaccgtatccctttcctgcaggcaccaccattctctgtgaatggatctctggaaggctccttatttgactttaggtaaggagagaactattttcttcccctcccaccaggttataaattccatttggatagggcctttgtctagtaaacagctacatctctagtgcctagaacactgcttgaaacatagtaggtgcttaatcaatatttattgaatgaatgaaaaatggtgggtctcttagtaatcgctggagggaggcggctggcttcagttgttggtggcatgctttagaatatcgggtacttaacacctgctgttttcagctgtggactctactaacaattttgtggtaacagaaagtcccttttgatgtcatagtacacatctattaactctatttaaaaaatgtgtgtgtgtgtgtgtgtgtgtgtgtggcatcaagttggtaaatttgcagttgaagtaaagcaaaaagagtatctgtgaagatgagggtattttttcagcatgtttaattaatattactacaggatagtttcatgctccactacatgtttattctgcatgtctgatgatacatttatttcaataataaggggctcatccttttcttagaataatggcttctctcaaaaaattctccaaaacaataataaataccatagttgactctttgaggaaacatgcatggagtgaagtgtgctggaagagcatcattcttactaatgtcacaattttctgcttcactgacatcacaatacttagtctaacaatttaaattatactatcttcatatcataaaaatgtaaatatttgtttcttgaaaatctataaagtagttttaaaatgaaagaggttagctaaaacccacaaatcatgcaatttagattgtaatagataatttttaatagtgaagcaacatctagaaataaacaagagtctcatattttagtttcgaagcatctaaatccacagttcatttaaaacagttcagaataagaatcgtggtctgttaactatttttaaaacaataaaactcaaaatatgccaaaatgtttctaaaacacttcaaaagaaaaaataaattcgatcatagttctgcattctcacttgccacatgggccttagaagataaaatgtaccaaaaaggaaacattttagcattctcaattttagaatggcatggtttgtggctgaaacaatatttaattttcccagctactgacagacaaatgtacaaattaaactaaaacacccatgaagagattcagatatttgtaaggacacaagaaaaaaggataggaggctcttatgaaaatgtttaaaaagcaaaattgattttgtctaccttaataataaataagctgtcttgtgcaaacttaaaagcaaaatcgtcgcctgaatgaaactgagattctattgttttttcattaatatttgttttaaaatatgctcacaaatgctatgaatttaaggtaaaagaaggtagagaatgagaataaatgaacataagtcctgctagttattaacttagatgtgtctcatgggggaagaatcaactttcaaatgtaaatgtttcaaatcttcaactttctgaattggggaaaggacaacagtgtttgtgggttatgtcagcattttagactgcgcaactaatatgcagaaatcacagaaaataaagatgagagccgggcatggtggctaacgcctgtaatcccagcactttgggaggctgaggcaggcggatcacgaggtcaagagatcgagaccatcctggacaacatggtgaaaccctgtctctactaaaaatacaaaaattagctgggcgaggtggcgggtgcctgtagtcccagctactcgggaggctgaggcagcagaatcgcttgaacctgggaggcgggggttgcagtgagctaggatcgtgccactgcacttcagcctggtgacagagtgagactccatctttaaaaaaaaaaagaaagaaaagaaagatgagaaagtaatatgccaccattacttccaaaaggctgagtaaacattgattacaaactaaaattttcacacttagatgattataatacacgaatggtccaaaaaggcttttctttgcgggggcgggggggcggtctgagaatggcgccaaattagatttttagaaactgtttttcggtatcaactaatttaatagagaacatggcatcaaaattttatctctaataataccttgcaaaatgagtgtgttcccaaatgttcctgcaagtcttcagcgctggggctggaccaagctgcacctcttgcaaaggcagcaaggctttggttttatcctcccttgagccagacacctgccttctgagtggcctcactactaatgtggacatggaagcagaggcagagaactgaggttgggggacagcacaaagaatggctgatcttactttacatctactgggaagccgggagactgtggtcatgagtggaaatttggggatcagaatttcagctctggtttgaataatatacattaatatggagtagttttgctagtaaatcttcacatttttattttacaagatgaaatttcagttcagtcttaaaaagtccattttaataaggataaaaggaaaaatgcatctttaattattgaccatatgaaagacatattgttggtttacctcctgtggaaaaagtaataacacagctatgtgg

SEQ ID NO: 21 - DNA, 207908 bp, Homo sapiens
gcttatgcaaagtggaagcaaggaacaaggcagaataactcagtcactttcatgaagatttttctaaacaagaaggcttaccaccaaaaaagaggtaccctagtggttaccctttgcagatgtgaaagctggaaaacttgacttttctttttggtaatgacttgcatttatctggtgcctttcgttggaggaatcccaacgtgctttagagactatctttttaacatctcttgtacatacatatatacttatataaaatattatcttgcccaactggacctttactcacttctgagcatgagaatgtcccaatagcattgagtttttcaagtggtggtttcagataagtgggagaaagaacaacccggctggcttaaaccctggagctaattcccacaaggaatgtagactgaatggtgacccagggagaaataatcttcctctcccctaaagtctcactaaggtttgaagtttacaggtgctctccactgggtctttgatcgaccttgctagataacatctaaccagcagtttcttttagtccctgaagctaaccagggagagtcaggttaattttctgtaaaaatatgaggtgacatctttggcaaccaggctgtcagactgacctgtaaacctcctttagggggacagagtagaaactggagatgacttgtttccagctgtgagcttgagagaagtgtcactcccagcatttgaaggttattgttttcaatgccagtgggccaaatatatgggccaggctttgatatctgtgatgtgcattttggaagtgctgggttgggaagtgacacgtctgttgcacaaatgcatattggttataggtttgtgttttctgccaaacccccacatttctcgggtttgtgagtgaggaagggcatgttgtaatgccaagctgatttgtagctcgtaaggtagtaattggtatttaacatttgcatttgttatttctacttatcttagcactcaaataattgaactacctgctaattcttgccgcatttcaaagaaaataagttgttatgcactttgggatagtggtgatctgtacaggctgtgtgttagctacttgaaggcgtaactggtatttcttgtgtgttttaacagcatgacttcttacagagctgtaatttttaaaattgaggatgccatatttgagatgtcagttttaacactcattaacacactactgtgcaagcattgacacaggctgcactgaaccattatgtctgattgctgcactttcatctctgtgcctcgattcgggaatgggcagtaatactgacacactcgggactccagcctcaaaaagtgtgcagattaaatagacaaaaattatttgcatctcttggaggcatttcaattacatatgcagtagcaaacaaggagggcattcaaagttggggaccagatttcctgagaaagcctgggtgttttttttgtttgtttgtttgtttgtttttgcaatttggggaaggagaagctgttgtttattcttggtaaaggcggagtcctagttttctaggatctcgaaccactagcctccttggtagaaggaatggtcctgtattcttgtaactcttgtgaaacagacacccctgcaggattttcctcctgcatgctttcctgctcagcacctctgtcagcctgccctgccagccccaacctgtcccaaagtaccactctccctgctgccgaagtaggctccctaatagtaaattggggaaccctgagtgtcctggctggttgggcatgaatactgctgggggatacatagagacacttcttggcattacttaaaatagactgagtatgggccggtccaaaggccatggtgaatcggtaggaaggccactgggctgacttggttctgctgggttttgcctccagctctgtgattgtaggcacatcctgtggcctctccaagcctcaccttccactgctgcaaaatgagaaggttggattagataatccttaaagccctccctacccacttcttcacctcaatataaaaacagaatttctgcatgtctctctatgtcctcattctagccatgagccgatcctgatatccctaatttatttttaagaagagcagagagattgcttacaaacaaccttctatttggtttcatttcctcttcagcagtcagctacaatagacgacagttgcagggacaatgcaatcaggaaaatgcttgagctaggttctgatccaagtgaatcaagttttaaaatcatcagcttgtctcctttgggatttccactatttccacctatgtacacggaatccagattcctcctattaacaatcattaggcagaggaaaatcaataagatcccattcgacttcagggctaactctttgctcattttggtttgttgcctttgtgaaggctaggagatcccctacctgttcccatgaggttattgggccccagaaggggccctgaggtgtatggagcagatggctctcccatccaacactcaactcacactgagcagtggtggcatctgcaggtggcctcgtctgtgtatgcagcaaaagggtgtagaaatctgtgttaaccttgccccgcactcgttaaggctgaggaaggacgcacagcactgctctccaacctcaccacagtctttgcgttccatcaagtggggtgtagctcagctcctcccctttagccaccatccctgcagcaagggtataaatggatattcagggggtattttagggccaggatgccttacatcttaaaaggaaaaacaaacacctccccttgagggaagaacttaaatgttgcatgtacacggttattatctcctcctacttttaggagaaatttaaactagcatttccacccaaggcccttacatggctgttacatccggtcaatggtgcaggtctgaaactctgcaacattttcctccttctgggacctcacttgtcaatagcaccatcctcctgggtaaattctcccaagcaaatgactgcatctgcagctggcagctgatgcattcagaacagagatgcaaacaaggcctcagagacccgtggaggggaaacagagggaggggaaagagatacaagagaaggggagaagaaggctggcatgccttggagttgtgtaaggccctacagaaggaacagtggataaaaagaaaccagaaatcggagggaaagagagaaaaaaaaagagggaacaggatagagtgaataaaggaaagggcagagaagaaagaagggaaaagagcagagagcaaaaagagaggcaatgtctagtgacattattctaggccttccattgagtctattttatttccagttaacctagtgtgctcctagcccagcaagtcctcctgggggcaacgatcactggggctgctcccactgctctccacctggactggcccccatccctgcttgccagagggctccacaatctggtagaatagagagcacaggagccccctggaagcatttttggatgaagggggcaatgaggacacgaggaaagaggaataactatttcctttgtgaagacaggacttctgggctacaaacagaaagaggactccaggagccagccagacagggcatggtgctgggagtcagggctggccaggtggagggaagggaaaaggaaaaaaccttttcctccagtaacagggacctgcataggcagagagaaggaggctgaagcaccagcatgtgtgcagaacatcgaagtcagtaagtctagagaaaagcaaggtgcagatggggggcagaagtaagccatctgaagagcctgagcttcattcttttgtcaccagggtacagatatcctgaccagatgaatgttgtcagaatatgactctagcatcagcttggaagtgtgagaggggacaggtggctgatttgaggtcacggtcacagtatagatcagatacaaagggagtggggtggggaggaggggcagtgcaggtggacggggaggcggctctgcaggactccatcagtgactggatgtgggatgagggagagggaggggaggatggtttctgggtttctggctgggttggtggctggatggatggtggtgccacctggagagacagggaatactcagagccatgttgcccgagtgcctgggatacacagagcgggtgtgcagtgggcagagggaggcctggaggccaggcagcaccctgagggagcctggcatgagaaggggcccttggggatgagtgaggccatagccttgcttttctcagctgactccttatctgccaacctatttctctccctttccctgagaaatcctgagggggtgatctctactggcgaccttggctttcctctcctgtcacttccttgtgttttctctgtgaccggcctctgttcccaccacccttttggaactgctgtcctgatggtcaccagtgctttcctaatagccaaattcagtggcctgtcctcaagctcccccgaattctttggccacacagatcaacctctaagtcctgggaactccctcctttgtgattttgaggcgctgtgtgctgcaggctctgcttttccctcccatcaccccatggttcttccttctcctctgacccctccctcttccatttctcccacagctctgtccacagccacaatgtccataggagcctgccacaccctttatccaactgcagcctcaacccacctgcaaaggacccctgtgtctcctgcccgacgccctcactcccgagccccacacccacatcacccatgtgcattggcattcaccctctctaaaatggaatttcccacttcactccaaacttgctcttccttctgacttcttcctcatttctatcaatggaaccacagtgttcttggcccttcaggttgaaatttcggtcatctttgaatcctcccaatgtatgtatccctttactcacaatattgattatttactggcagctgagtaattgccaagtaccatgttagatgcaagggaaataaatccaaagggcattgcgcacagtcataagcagtgtagacttgagagacactttactgtgcagcagaatcctctggggagctcttcacaatgtagatttctgggcatcacccatctacaaattcagactcttgaggtgaaaccaggaatctgcagttaaaggctcccaggtgacttgggttcaggtggctttcagaccactcatggggaaacactacttcaggggtgccccttgcagtagtgcctctgtctcctcacctgcacccaccggaccaggtgtcacccacactttcctcggtatcttgcacatcggtcctcttgtatccatcctaaggctctcaccccgcttctgtccgtgttaactcatgttcattcccaacagactcatccctaggctctcccccaacaacccatccttttctgcaacccctccactcccctcacacacaggctaatctttctctttccagtgtcttagacttactagtgacttcttggccaccgttggtgctcctgttgaatataaccgcagatgccaagggccacagccgaggaagtggaaaatctgcacgggcccagtaaggctctatctaaaagacagaaaaggatttaggaaggagttgcctttcaaccagcaaccaggcacaggcagaagagacattagagctttgtaacaagggacacacagagttggcagcacaaagggcctgggcctctgaaggttggatgaccaggctcatcatccatccagggatgaccgagcctgtgccctagactattggcctcccacagcagccagtccatctgcccagcagtccctgggcacccaggaatgcagcctacacggcatgagcgggcaggctgggggtatgtgtggcaggaacagaattggggttcttggggaggtttttttccacttaaaactctttttgtcgcctacgtctccagacatttaaagatttctgagctattttcagacctactatgaaaagaactgaggtgccagcagtcagacacccatcgaactgtttcctaagaggagaactggcatgactcacttttgatctgtcagctttgtattgatttttctggcaaactttgtaggtctgcccagggttgactccaccaggagcggctacgttgtaacccactgcgtccagagtcagtcattacaaaggccaccatcacaggatcggattctgcatttctttttgtgggaatgtgggaggagaggagggaaaccacaatccacaaaaccaagggtgtccctgggcttccccactgcctgctgaagggaagccaggcagctctctacatgcctgtcctgggctagggactgagggctacttttggaaagagggactgatgggagctgacagaggcccagaggcaaaccatttccaccctgtcctttcctctacactgggaaccggggagccagcgattggaggctcagaaggaggatggtgaggttttatgcacagtttaaatatattgctatgtaattttccaattttaaaacatgagatcactgattattcagtagcttccccatttttttacaaagccctcctgtgtgtatgtttgtgtgtgcgtgtgtgtgtttaaagccttttcagtcaaactgagatatcctaccgaccttcccattgttcctgagcccccatgagaatgtgtagatgtgtgtcagagctttagagcctgcaaggagctcccgagtctgaggactcacttgtgctgatatttcagggaagagcttgatgcctagaaactggaatgtgcagatgttgcatattcagagactgaagtgctggcctcagcaaacaatgccaggagaagaaccaagaggtggaaccacgtcaaccaggagccattgtttcgctgagggcaaagccatttgccaggccctgtgctggctgccctagccctcagtgcctcccctcaactttcctgtgggtgccctcaggtgaaacggcccctcagacagcccctcaggagcaggtttgacatgtcactgagagatgcatatgtgtgtgtgtgccggtgtgcatgtgtgtatctatgtgtgtgtatgtgggtctctgtgtgagtctctgtgtgtgtgtgtgtgtgtgtgtccattatgtctgtgtgcctggatgtctgtgtgtttctgtgtggccatatggatgtctatgagtcttgtgtgtatctgtgtgtgcatgtgtatatgtgtctgtgtgtgaatctctgtgtccacgtgtctgagtgtatgcatgtgggtgtgtctgtgcatctgtgtgtgtctgtgaacatgggggtggaatggaaggggacagcctcacccgtggggagaaggggatggaaacagctgctctccagggctcctggtagacatcacttccacagagaggctttctctgcactccttccaatttaaattctgctttctgccagccaatatctctccctcgtgttgtctcactgcatccaatgcttttccttcttagctgttattgtaatttgtcatttttatttattgggtgatgtctgtcacccccgctagtctggaagctccatggatacagggatattttatctccagtgcccaatacaatgcctggcacagaataaatgctgacaaataataaatgaaacgaggtcagaagggccttgtcattgcccttctggataaattgcgggtccctgtggagtcgatttgacctggtacatagctgcatcaagagtcaggagtttcagggcaccgacatccttagcaaagcctcccaggctggagacctgtgacatgctagccaggcactgccaccaacaatgagattggaagggacagctttcctgagaggcacatttctgaatgacatccagaactgaggaaagcttgccagatattcccctcaggtaatgactaatgcacgaaccagttcccaggtgaataatgtcaaaaggaatcactatataggcccccaatccctctgaggcagggttcagtggaaatcacacactattaggcatcagagcagtggtcaacacatgcgcacacagttgggtcggcaggtattactttatactagttagagggataggcttaacattaattaatgtctcattgctgatcctctagcaaaatctaaaccccaaacccaaacctgagcccttcatttaaatgtatcctctgtggccagctcagcacaatgaagtctgcataccgattcagccctgtggttcactggctggatctcaaatgaagctggcagcgcatgtgctggtgtgggaagaagagcttgcagtgtgcatttgtcatctgccatgcactagcagtgagatattgggcacaacacggcacctctctagccttcagggaagaggtgacgcctgagctaggacttgcagggagaggagggatatcagagggaggatgtgcgtactgattcctgggggcaggaccagggatagctgctgccagcatcaaatctgctccagcgggccagtctagccccaaagggataaaggagttgagggtaggctgctcctggggccctcctgagaggcacagacggacaaaaggttggggactgggagatggcaggaatccagaccgagagtgtgaccagaggccctgagagccccggacacaggcagggcctttcagctccagctccagctcctgggctggcagtcttaaggcaaatttctcccatttccattttttaaaaatttattttctaaattttaattgtgataaaatagcagaaaatttactattttaagtgtctagtttgttggcattaagtacattcgcattattgtgcaaccatcaccaccatccaattccagaacccttttcatcttgcaaaacaaaaactctgtgcccagtaaacaatagttcctcattccccaatcccctgtccctggttcagttttctattcaattttattacataagcacgtgtgtgtgtgtgtgtgtgtgtaccattaaccagtggtacagtgcaaaaaacttacataaatcttcattaaaattctaggtcagacatttactactgtgagaattcggttaagtaacatctttctgaacatttgtcttctcagctaaaatctaaggaggaggatgatgatgttaatagctaacattcactaggcacatgtccgtgcatttccctttctcaaaaaccctataaaataggttctagtataattttcactggtacatgaggaatcggaagcacagagatgtatcccaaggccacatttaacatctaccttagagagaaggtcactgtgaagaaagtgccaggtacagagcccatgctcaaaaatgagggttcccgttgcctttttcaggagtccttaccaggtgtggtttatatagtctgtgtacggagcatcctttgtgcagcaatgagtctagagtcattgcattttagtcttcaccacaacactagaaggtagatattttaaatgtagtttcaaaatgtgttaatttgtaattccacgatagttgaaatcaaagaaatcaaaccttacagggagaactcaaaattcacatgactaccgccctctaaactcagtccctgctccagagtaactactcttattgcactagtgtactgtatgtcttcccagacctttctatgaatagacacatctttatacccggagaattgaaaaatgcttttgcagcttgctctgttctggaaacttctcaatatcactcagagatatttttccatatcagttcataaaaatcaacctcattctttttcactgcacagtgtggttgtatcaaagtttatttagccacctccttctgatgatcagttactgaggtgggcaatatcttcctttgggcctgggtaccttttccaaggccatctgactggcaagtggcagagctgggttctagccccctcgtttctggctccaaacccaacagccatcaccattatagtataaatcagcacaaacataaagtctgttttcaagtcagatggaaactcagtagttactgactacatttatttgttcaatgctcacttatttattgagcatccactatgtactataaccagtggtggagaatctccaccttgaagtgtctcccctcttggcttccaactccatctcatgcctcctggcttgttgtcaaatttgctggccatccctcttgctccactgccccctaaaattttatctttgttccctttttgtttcctcacttggcacagctcccgtgggcctttccatccatgcctctgattactaagtcttcatttccaggtctccctctctcattcagctccagacccatgtttccagctgcccccaggatacctgctcctgcatatcccatagccatctaaaattcaacatgtccaattctggactcattctcgcatccctaaaacccactcctattccaataaacggcatcactgctttggggcggcccaagttgagtctgcagggctaacttcatcttctcactcttctttgtcccacaaattcatttagtgaaccagctccattggctcaatttcctaaatagttctgggatctgccctctcttctctaacaccactgccctatcataattcaagcccccagcccctctccctgaactagaacaaaagccttcccctctccaattctccaagctcccaaagcacctcatccattcctgttatccctcatctcagcactcggaacttacaggtctatgtctggtcgaggcatgggccatagtccaatcatcttaatatctctggtacataattgtttagacacagttttcctgaatgtttgctgaagaaatgttagcaccaatggcacttccagaaatgctagataaaaccaccaaggtgcgttatttcaggccctcaccttttacattatggttttagggaaagtgtaggaataaggacagagcagaatgtctgttcctacatctgcatgtgtgctgaagctgactgagcacttcttactgttaaactcgttcctcagtgttgcggcttagcagcattacgaataatatcatttccactatctctgtgtggtagctgttggtctgtcattcacccttgatttttgcattgtaattgcacatataacaaatgtataaaataaagaactagaactggtagcaaaaagatatattattgcatttactgtgctgcttgcaagtatgtttttatcttctcaacacctcaactgaggattgtatgtattctataaagcactttttagtactgtggttgggtcctcacagtgcaggaagtcctgagactattaagatatccctcaatattcacacagatttttgtaccaacgaccacagaattataggaataaaaattaaactggctcttagctaaagcaaaaaaaaaaaacaacaaaaaacccagactctgtttttctcatttttgtaaagcagatgtgaggcatctgtctgttttgtgtgaattaaacggtctagacatgctttctaaagaactccagagatgtgactattttcattccataagacaatagagaaactcatgtctctccctttagaaactggggtatattctttcaggcctgacaatgtagttgaattcaggaaatacagcagtatttgccacctaaattttcactttcaattggataattatttgttcaaggccaaaataaatgcttcccaagctttcagggtattggctattgagtaatctaactcaggtttgggcgataacaggtatgattttgtgaatggcagtttgtttccagtgcatttctctgcctgtatctatgttcatgagtttgcttgtcttcccaaccacccttccagcaaacactgaatgatagtggcaacatagtgatgagcaagatagacacaatctgtgtcctcatggaggccagcaaaggcatttagtagttaaaaattgggtttctaaggcttcttaaccataggctgggcatggtggctcatgcctctattcccagcactttgggaggccaagatgggcggatcagttgaggtcaggagtttgagaccagcctaggcaatatggcgaaacactgtctctactaaaaatgcaaaaattagccgggcatggtggcacgtgcctgtaatcccagctattcgggtgactgaggcaggaaaatcgcttgaacctaggaggcggagattgcaatgagccgagatcacaccactgcatatttcaaatgtagttttaaagtgtgttaatttgtaattccacaatagttgaagacatgcatcataagaaatcaaaccagggcgacagagcaagactatgtctctaaataaataaataagtaaataaataaataagatttcttaaccatttgcttagatccaaaatttaaatcacgtttattttacctatggttcctccacccatcatttgacaaacgtttattcagcattactttgtcagggcctgtgctggtgctacagagatgaggaaaacgtgggcacagtcctggccctcaggcagcttacagtcagcagagaagacagaagagtaagtagataccataatgcaatacagaaagtgcggtgacagtgatctatatctgggtatacagaggaggtgtccctgagctaagctgaaaggatgagtaagacttggttgcctcaatttcaggagggtgggcaggagctaggcagatgtaggtcacttaaaggaatgtcaagagatgaggagagggaggtggggccctggtcagagaggctttaatgacccttatcctgcatgtgatggaaattcactgcatcctggattcacatgctggcagatggagcagggtgagatcgactgaggaggaacaagcctggcacagagcccagttaaggggctgctgtgatattctggcaggagacaatgaggcctgaagggtagtggaggtagaatagaggacacagatttgggaacatcttggaagactgaactggcagaggtagaatggcatggggtgaaagacaatgaagatttaagggggactcccgggtttctagcattagtgattggatggaagatggtggcaccaactgggcagaaaatacaaggggaatggcgtttggtcatgttgaacttgaggtacgtgtgggacattaaaaatgcagatgtgaagttttaaggagaagtttgggtcaaaggcagtaatttgggaatcatttgcacatgagttactaaactgagtttgagccaccagtaaatattaaaaacatcacaaaagatgggcctgcaggagttacccctgtgtttactctgagaatagtgataattgaatattgctgttgaattcaattttgatggcatgcttccctatgggtgccattagagagacacttcttatcttggtactaagaatagttggctttcttctgagcaacagagtatacttttatcttttgttttctgtagttcaaaaacttttatttttatgattataatatagcttaatacaatgtattcattttttaaagcgtacagttccacggtttttaatatattcagagttctgcaaccatcacataatcaattttagaacaatttcatcacctcccccaaaaatcctgtccccattattttattcctttttattgctaaatcatattccccagaatggatatacatttcatttatccattcatcagctgatggatgcgtttagctaatagactgtcactgtcaaatagaaatgtcacgcaaactacaaatgtgagctacatatataattttatattttctagtagccacattttttaaaagtaaaagaaaaacagatgaaattaattttaataatatatttccaccaaacatatccaaaatattattatttcaacacataataaatataaaagattattgagatattttactttttttgtatttttttgtattttcacagtaaaatatcgtatgtcatatcttttctcatttgttcttaatttagctattttattatgttttatgcatccttctttgtaaattgccttaattaaaaatggaaaatgctgatggcctcaagaagaaaactgctgacaaaaagaagataagcttttcactcggagcatgcagatagtgaactgatttgaggaactgaatataaacctgtctcctcagaagctgttgccaactctctacctacctctctctgcccctttttccccaacacctaacctcagcaagcctctgcagacatcactatttctagatatttattaaacagtagaattgagtacagccgagtgtgaccagtatctaaaggcaccagaaaataggctagctccaactggtgttaatttatctggaaaacattcagtgatttgggaaaacaaaaacaaaaacagaccacatgattccatgacctctcctaaactgcagggcagagagagtaagcaagacaaactaccctcactgctttaattgtgtaatgaactttctcagacaccgaaaggtatgctagacattctttctcatctctgtctttatatatgctttgccctcctcaaagtgcctttctccctttcctgccttacatgcctcaagactcagttcaaatatctcattagtgaagacttcctctattcctactcctgcagggctttgtttacatctttcttattgcaatgaccacacgtgggtgtccatgcctgtaccaggctataagcaccagctcttgggtaggaacaaagctgcctttatttctgtatttcacacttagcttagacactggcacacagttggtgcttaatagatgcttgttgatgagtaaagaaagtgcaagtcatgggtactcatgggtgccaggtagtgtttgaagggttttctgtgcatctctcatttacttttcataaccctctgaggttgtctctgcttgataaagaaggtaagacttctgatcattagagaaatgcaaatcaaaaccactgagataccatctcacatcaggcagaatggctattactaaaaagtcaaaaaataacagatgctggtgaggttgcggagaaaagggaatgcttatatactgttggtgagagtgtaaattagttcaaccattgtggaaagagctaaaaatagaactactatttgacccagcaatcccattactgggtttatatgcagaggaatataaatcattctaccataaagacatatgcacgcaaatgttcattgctgcatcactcacaatagcaaggacatggattcaacctaaatgcccaccaatgacagactggacaaagaaaatacagtatatatacaccatagaataccatgcagccataaaaaagaatgagataatgtcttttgtgaggacatggatggagttggaagccattatcgttagcaaacaaacacaggaacagaaaaccaaataccacatgttcttgcttataagggggagctgaatgatgagaacacatggacacatagaggcgaacaacacacactggcgcctacttcagggtggagggtggcaagagggagaggaacacgaaaaataactattgggtactaggcttagtacctgaatgatgaaataatctgtacaacaaacccccatgacatatggatttacctatgtaacaaaccttcacatgtgtccccaaacctaaaatagaaggttaaaaaaagaaggtgagacttataaaaaggattaaggaactcactcatggccatgcagtaagttaggcagcagagcttcaaagatacctacctttgaggacttccaatctgtaaaagatataatctttcttatatttttataacaacctcaagaactaaggaaatgaattgacttctaattggacagagtaaggataggccttttctgtcagaagaaattgttttctctcaggcaagttagaaaagaataccacagacaaatattgcatgtatttgtatatatcgtattgcatatatactatatatatatatagtatctatatattgcaatactatatatagtatctatatattgcaatactatatatagtatctatatattgcaatactatatatagtatctgtatattgcaatactatatatagtatctatatattgcaatactatatatagtatctatatattgcaatacattatgttgcatgtatttgtatatatttgtaaaatatatacaatattatatatatgtttgctatcattgctgtggatgaatgtcagggaactgagcaaggcaccaggattcattgaacaagattaaaaaactagcaacccattagattactctgaaattgaaataattttacattaagaactttgtatgtaactaacctgcacattgtgcacatgtaccctaaaacttaaagtataataataataataataataataataataaagcaatataaactgaaaaaaaaaaagaactttaaaaacattctgcttggacttttttgactgcctgacacattcaaattcaaatcaaactccaaatcactacttacttgttaaagcaattaatttactctcagaatcaaaaagctttgctgaaacttttaaaggtccatttcattcattcattactatcaggctgtaatatcacatataatttttaaagatgacatgctaagcatgcaaactgatttatggtcgtcagctggtgtgcttttaaaataaactcctatatactttatggaaggacaacagagaaggaattcatgaatttgcacactgattgattaataatgaaacaattccacatttcagattcctccatgtaccttgtttttccttgacatcaaagacttctgttccaagtgctattacgtcttttcattcaaatgttttgccaagaatattttctttccaaatgggaaagaaagctgtcatagaataagtggaaaggctgaaaaatgcgcaggtgcaggagtgccctatctaacatggtcggtatacactgaacatcagggaatatttaaaagctcagtgctttagtatcaggttttatttagcttccactcaactaattacagttcaccttggacattctataaaaatttaaaagacaactagttgcttggtttaaacataggcaggcactggattttctaccagaaaaattttgaactgattaattcttagtgctctctcataaaatgacatagactcacttttctgttgaggaaacatggggtatgacatagatttgtaatttttggttaaaatgtcatttgtatcatgctaaaaactatttttctttgctctcatcttttttttccttcatatccttctctttctatagaaaacattaagtaacttatgaattgaatagtaaaaatggaaaaatacagagaggtagatttttttataagaaattctttctgatgtgttggctgacctgggactgaaaggtgcttgcctggtaagcttgaatcagtttttgtgttaatgtgatttgaaaacaggttgtgaggacaggaggtgtgagggccaaaggtactgtgatgttctctatcttggctccttccagaagaagaagaagagaagttatctcagtctctgggaaccttatattctagagttccctttcctcctggatggtaatattcccatacagaagattccagcaattgaactacaactcaccttgatacatattgccatatttgacactcacaagaactctgtgagaagatacacagattacacatggttgatcagatgttttttagtggaagaacccatgcctccagatagttcctttaaaaaggtattttcagttgttataaatataggatcagagaaatgtagatatatacagcatagaatcctacaaactattaaaacataaatttaattttgaacttcctgggaccaaagcaaattgaggccaagtcaatgacatggttcatatttgtaaggaccaagaacgatgaaacttcagtgaaccaaaactttaagaacataaatttgatatttcctgatgggtcatcacaaatggggcaacttatgctggccttaacaatatccttacaataatcatcttaaagaggagggggaaagtttagcataacataatgttatgatttggatgtgtttgttcctgccaaaactcatgttgaaatttaattgccaatgtaccagtggtgggaggaggtgcctttaggaggtgattaggatgttaaaatagattaatgcctttctcttgatactgcgttagttctccggaaatggattggtctctgagtgaatgggctattctaaagaaagatgtcctctcatatttaccccttttcaaacacactcgctttcccttttgtttctccgccacactgtgacacagtatgaggctctcaccagaagccaaccagatgccagcatcatggttcttgacgttcccagcctctagagtcataaacccaataaaactcttttctttaaattacccagtctcaggtattcaataaattacccagtctcaaccattatagcaacacaaaatggactaagatatacaactttctttcctccgtgtatagagaatactttaaaaaattgagcatgatagattctcctcagtgcaaatcaccaccagagagtaggtcaggcccttacgagaaggcctaactgggttctaggtgactctaattcactttcgaagtaacaatcagcttgcttatcaaggaacagagcccccttcttcattcttgcaaaaacatggcactaaactaaaaagagttaaaagtttgttttttaatttagtatttacgtgtcatatgtcaagaactttgctaaatattgtacatgtcctagaacatttgatcttcccaattgctgtattacagatgaagatattgaaacacagaatgattaaatggttatttctgcccaagacaacaaaagtgcaaaagaacaactgggatttgaacccagatcatttaatttctgatgccaggctccttccgccatgctgattaatgtttctctaaagcaatcattatcaaagaaagactgataagagagaatataatacattatcatttacaacaaaacatagatttcaaggcacaagaacgccacgtatatcctaaaataataaaagaaaaaaatcttgtacgactcatcttggaagcttgaatgcatgcaccctgcatcctttttctacatgtaggaaggatgccatttcagaaaatatagattccactgaaatgtgaaagaggtaaagtcatccaacaacagtcctaagttgtaactgaagagccatcagcaagcaggctcagcaaccctaacattctaaagctagacctcctgtttattaggctatgtggtctagcggaaatgcaaagattttagagacagatgggagtgtaaggccactactggcattaactagctgtgtgacctcatttaatctctctaattctttcttttcagtcctccctttctttttcaccaaagggaatatgcatcttcttgtggaggtttgagatggtgtatcaaaaatgcatgggttagtagatgctcacaaaattattattattgttgttatggtgattatgtggatgccaaggagaaagacagcctgtatgattaatgacaatttttttttgtttgagctcatggcgttcaatgaaactttaataccaaattatatctaatatactggcatgcattgtggggaaacaagatggataaacaccaagtctctgccgtcaggaactttacaacccataaataaaataatgatatagagagtttggaagcagttcagtttgttggcggaaagggctcaaataaaacaataatggagataaggtcataaacgtcacttgaggcctgttgcaggtcttgaatgccaggagacagagttcattctcaacttggcaaaattctgtgagcagaaaagcaattaaaaaatcctaatttttatttaggtagctttatcaagtgaagaaagtggtggcaaagagtctgactaatgatgtggtccagtgtgagaagagcatgaagtaggaattgtttttccaagattggtggaagaattgagctggttctctgcttcccctcttggagtctttctgggaccccaaaaggaagtagaaggtagttggctgaggttgaaggtggtttgtatggaacagggcaaaactgactgactccctggaagtcaccactcagtggcatcagactgcccgaccagggtctgtaaaacttccttgggtccaggtcccatcatgttgcccaaacggcaaagaaaaatagttctcattagattccagattcctagtctttcaggccaaaaaaaaaaaaacaaaaaaaaaaaccctggtactccaaaattgcattttgatgaaatatctaattaaatgcctatgcctaataatggtttagtaatgcgatataactccaattatttttctttaatgatgttctacttagaatgttattagcattttcaggatttattttaatcattaatctttaacatacaggataggaaatgaaaatagcaatcctattgaatgctaatcagtaatttgaaaagatttcctgtgactaagttaaaaaacatcttattaatgtattatataatttgttacagaactgcacatccttcagtgagtagagcatgattttgaacactggggaggtgattcagtaaataagcggaggaaaaatataacagcggtaagtaatgtatttaaggttgttcatcaaagtgtctgacatatagtaagtgccccgaataacaggtgttattattttgaaatccatttgaatacactttcttctccaatttgtatttgccaaattagttcatactttgaacataaaactatttctgctaaaataagctaagtgtattttaagtctgtagaaatgagtcatctaagttcattacaccaaagaaaaaactttatcatctacaggacaatatatacaatgatactagcttttcagcaagatgaaaccctgattcactagcttcagttacattcacgatactgtatttattaaaggatgaggtgtgcagaaaagtacacttacctatttttggaaagttcccagcaaccaggttaaaataggtttcttcttaaactcattaaaataactagaaaactgtctttcctaagcatcatgattaatcaaggcttaactagacttgaagatttttttttttttttttttttgagacaaagccttactctgttgcccaggctggggtgcagtggtgtgatctcagctcactgcaacctccgccttccaggttcaagcgattctcctcccttagcctcccaagtagctgggattacaggcgcctgctaccacgatcagctaatttttgtatttttagtagagacagggtttcaccatgttggtcaggctggtcttgaactcttgacctcaagtgatctgctggcctcagcctcccaaagtgctgggattacaggcatgagccaccaagcctggcctagacttgatttctttcttgttttttttttttttttttttttttcgagacagagtctcgctctgtcacccaggctggagcgcagtggtgtgatcttggcccactgcaaccttctgcctcctgggttcaagtgattctcctgcctcagcctcctgagtagctgggattacgggcatgtgccaccacgcccagctaatttttgtattttcagtagagatggggtttcaccatattagtcaggctggtctcgaactcctgaccttgtgatctgcctgcctcggcctcccaaagtgctgggattacaggtgtgagccactgcacccaggcagatttctttcatggcttgtgattcttcaaaacatatcttaaattcctttgactggtaggggcaaagagtaagaagataggaaaaatttaaaagtaggtcatcctaaaatgttttggagtttcctagggctctaaaataaaacaatgcccattcctcttaattctcttaaatatatgtgtgtatttgtgtacatacacttaaatagacatagatataataggatataaagtctaactgcagaaaattgcaatgtgagtggaacacttgacatattaaaaggaggactctcgagattgaattaagagtggttaacaggcctcgctgagttaatttgcatacattttctaatttagcaaactgaagagaaatcatcttcataggtttcttgtccatgtcatgtaggtggttttgcttggatgacagcaaatcagtcatttgattccatcaaatcaggcaagatatcgaacaggttagtaaaaagaaaaataattaggaaaagaaaaaagggcagggtgtttcagttgatcaactcacacaactgtccccaacagactccagtatagatttgctgaagcatatattgtaaattcagttcttcattttttaataatctttgtatgtttcatacttatcgttctttttataatcttataatttgtatccaattatacaatttattattatttgtaagggctcaacagggtagagacaaatgacactttgaggcattacctagggtacaaataccatttttaaaaaggaatggaagctttccagagacaatataccttctgtgacagacattagtgaactcatcagcttttcctgttctctcccctccagctacgtggtgatgctactcttcctgactccctcgaagttaggagtgtccatgtgactaattctgaatactgggttgtggccaaccagacatgtatcactactggctggagctagtatgaaactctccagctccccttctccttattgtggtgaccacagatatctcagatggttgaggccctgtcagcaggtccctgggtgtggatgataggagcagggcgccctgccaaactggggtgggcctggagcaagagtgaggaataacctgtattatgtgaagccgctgaagggtgagggttgtcagcactgcataatctagcctgtcctaactaatatacgtcccttgcttggaaaatgcagagtccaggtcatgagttttaacaaagatacagaaacgaaatatgctgggtggcacagtgaaatttatttgtctttatgatttacacataataattaaacacacaaaagaaaaaacactgtcaagatggccatatgtagcttaggaaatgactggtcccaatgcaatcatataaatgttcattcagcgtaaaaatgagtttctttttaatggttttaatcttttttttttcagtccccaaggcttgtaccactcagtacaaatgtttttgctactgggttatcatcaggaacatgatgtttaccaattcccaggaaatgaataaaatcaacagaaacatcctgtgacaacagagcacattttcatagaaatgaaattgatgagcttattacagtttgaatcagttcagctattagatctacacataaaacatgaaacaatattaacaaattacatttgtattaagtttttatttaaaaatatttatcacacttttttgtgcaagggttccattgatttctttggttttaaacacgatagatctattttacctaaatatatatagttctatttgtaccaaacatcaaaaatcaaaaaaacaaaatttcaaagggtaaaaatggaattattgcttcaatataaaaaaggcctagcccatttgagaactactgccattattgctttcctatttgaaaaactatcctggaaatcaaggaatgtaccccatagctccctgcagaaagtataaattggttgcacattatcatcatattaatatgaccctaccttcaccaaagctatcctgatcttgtccttaaaaaatgaaacaaagcaaaatagcataaataaataagtttacctaaggggatacaataaatagcctagtatactagataggaataaagaatattgtaacataaagcccttcagtgctgtacaatgcaacaatagctttggattttcaaggtttagagaccttgaaaatccatttcataacagttttattactggtatgcagctgacagaacaagagaatacacttcttttgttctcctcatcttagagtgaatgcacagcagatacaactgtcaattctgccttttgggaatttacctgggcatgtaccattgtcactttttgacctctgcctaattgtagggcaaaatcttaggattaaaaatatccaaatattccttcaattcctagtggtttcttggtctccagaatagttaaaaacagagaggaaattagactcaaaagttttgctgccttcttttctttgcatccatcgcatccagaatgggctgtcttttcgcagtgtatctctgacgaagttcttctatctcccgttccatcatggggtccagtgcttttaaccgcatctgtagttcttctaaacttagatttttcaactagatacagaaagaaagataccaatacaatgaaattatccacattatccacaatcaatacaatgaaattagactttaatgtctaatgagttttaacataaatatttcagcaaattctttacatcatctttgaagtatagttcaacaattaaaacaggaatttcttccttgaagaactcagaggtcatatcttgcaagaacctccagtaatctgcaatgaagcaatccgatcctctgcctttaataaagggcaaatgagaaaaatacgctgatggaatttgtaaaaaggtacaaagacaaatccaccactgccaacaaacagattttcagaatatgttccaggtatattcactctaactttttacatctttgccagctactgagtgctacaataatcatgaacacttgcagagatcactcaagaatgtgacaagactgaataaaggttaaattaaccattctatcctccattttactaaatgcttaataaagaagatgactgtggtagggggcgggaagtaaggctgaataggcctggtggggccccaaaagcaggaagccatgatcaattctggagtaggacagttatgtaagagtaatccagatttggttttcttttcttcttcttcttcttcttattttttttgacacaaggtctcaaacttctgggctcaagagatcctcctgccttgacctcctcagtagctgggatgtgccactgcacccagctcaggcttggttttaaaatgataaaacttgcaacttactttttgttttaagaagataattgcctttggttattttatgagtcaagctaggaaaaatactcattacttatagtcatccaaagtagcatttctcagcagatccttttactcgccatccctggccctatcgtgacttctgcttccaaaaaccaaattcactcttagctgaaaaagactctgaggatactgaaaagaatgagtcatagactctctgaaggaaattcaaaaaaggagttccaaaaatattttgagaaatgacagtgttatggagaagagtatgcaggcttccatgatgatgactttgaaggtgaatgccactcacttcggtgcataagaagttctggtatgtatattaataatcagccctgttattttgtagtcatatgtcatgaaagaacctagcttttaatattatgccataaaacatacatttatatatcatatgtagtattatacactttcttcattgatttttaatccaagtagtgatcttgcatctgttacatgctcagtgctgttcaaatcactgtggagatacagaataagacaaacagggaaactccaaactttgaactgtacacatcggtaatggccacattgaaaggccaatgtataccacacaaccacatttcccaagaaagacatgcccaactatgtctatgtaggatccagttccacttctgtgttcttcaacatcatctctatttcagcccatgttaatctttcccatttctaaatttctatgtaacactcataatttaaacaacacaatttagtatttgattctaaatcatgtactattttataattgatttttatgcatgagtttcatgtccctagatattccaaaaaatacttagactttagagactgtacatacaccaagaaactatcctactatactgcaaataacatgacgtaaacgtagatagataaatatgaataagaatatatgacccaaaggagtgggttactctaagatcagaagaactaacatattatataaagcaaacaattatcattactttaattctgaattaagatattcctgtaaatatcttgtactacttttactggggcaaactgccaataggtttataaatattgtattgcagtaatagactgaactcagaaaaagaagctacttagaagaaaaattttcttcctttaacagatttttatattatcaatgcgtaaaatttgtgaaaaacaggtctgtgatattagagaaacattatctaacattattaaggaattaggtgttcatgtaagtaaattaatgaagtacctaaatcttagttctttaagtgataaaactttgtctcaatatcacatacacacacatatacacacacacacacacacacatgtgcacacacacatgtatttacatatgctcttttttggttctatgtgacttttaggatttttttctaattttgtgaaaaatgatgttggtattttgataggaaatgcactgaatctgtagactgctttgggcagtaaggtctttttcataatattgattcttccaatccatgagcatgggatgtatttccatttgtgtcatgcatgatttctttcaacagtgttttgtagttctccctgtagggatcttttaccttcttggctaagtatattcctaggtaatttattgctattactattattattattaattattttacagctattgtaaaaggggttgagttcttgatttgattctcagcttggtcactgttggtatataatagtgctactgatttgtaccactgattttgtaacctaagactttactgatatggtttggctgtgtccccacccaaatctcatcatgaattgtaatcctcataatccccatgtgtctagggagacacctggtgggaggtgattggatcatgggggcagtttccctccatgctgttctagtgatagtgagtgagttctcacaatatctgatggttttataaggggcccttccttcttcaatctcactctgctctcccctctcaccacgtgagaaggtccaggcttgcttcaccttcaccttccaccatgattgtaaatttcctgaggcctccccagtcacatggaactgtgaatcaatacacctctttcctttgtaaattacccagtcttgggtatttctttatagtagtgtgaaaatggactaacacagttaactggcactgaggtagtggggcgctgctataaagatacttgaaatgtggaagcaactttggaactgggtaatgggcagaggttggaatagtttggagggctcagaagaagttaagaagatgtgggaaagtttggaacttcctagagacttgttgaatggttttggccaaaatgctgttagtgatatggacaatgaagccgtggctgaagtggtctcagacgaacatgagaaactcactggcaactggagcaaagatcactcttgctatgctttagcaaagggactggtggcattttgcccctgccctagagatctgtgaaactttgaacttgaaagagatgatagggtatctgggggaataaatttctaagcagcaaagtgttcaagatgtgacatgggtgctcttaaaagcattcagttttatggattcacaaatagatggtttgaaattggaacttatgtttaaaagggaagcagagcataaaagtttggaaaatttgcagcctgatgatgtgatggaaaagaaaaacctgttttctgggggagaaattcgagcctgcagcagaaatctgcgttaagtaataaggagccgagacaatggggaaaatgtctccagggcatgtcagagatcttgccagcagccccatttcatcacaggcatggaggcctaggaggaaaattagtttcatgggccaggcccaggggccctgctactctgtgcagccttgagacatggcaccctgcatcccagccatttcagttccagtcatggctaaaaggggccaaggtacagctcgggccatggcttcagctcaagccttggtggcttccacatggtgttgggcctgcgagtgcacagaagtcaagaattgaggcttgggaacctctacctagacttcagaggatgtaatggaaatgactggatgtccagtcagaagtttgctgcaggagcagagccctcaaagagaacttctggtagggcagtgtggaagggaaatgtggggttggagaccccataaagagtccccactggggtgctccctagtggagctgtgagaagacagccactctcctccagaacacagaatggtagatccattgacagcttgcaccatatgcctggaaaagctgcagacactcaataccagcctgtgaaagcagctgagaggagggctgtaacctgcaaagccacaggggtagtgctacccaagaccatgggagcccacctcttgcatcaatgtgacccggatgtgagacatggagtcaaaggagatcattttggaactttaaaatttaatggctaccctgctgggtttcagatttgcatggggcctttagcccctttgttttggccaatttctcccatttggaataagagcatttatccaatgcctgtacccccattgtgtcttggaagtcactaacttgcttttgattttataggctcttaggtggaagggacttgccttgtctcagattagactttggacttggacttttgggttaatgctggaatgagttaacacgttggggaactattgaaaaggcatgattgtattttgaaacgtaaggacatgagatttgggaggagccaggggcagaatgatatggtttggctgtgtccccactcaaatctcatcttgaagtgtaatctccataatcttggtttgtaatccccatgtgtctagagagagacctggtgggaggtgactggatcatgggggcagtttcctccatgctgttctcatgataatgagtgaattctcacaagatctgatgggtttatgaggggctctttctccttcactctctactctctcctgccaccatgtaagaaggtccaagcttgcttcaccttcaccatctgccatgattataagtttcctgaggcctccccaggcacgcagaactatgaatcaactcgatttttaaaaacatattgagacttgttttaggcctatcatatggtttatcttggagaatgtttaattttggataagaagaatgtatattctgcaattcttgggtagaatgttctgtaaatatttgttatgtccatttgttctacagtgaagtttaagtcctgtcttcattgactttctgcctcgatgatctgtctagtgctgccagtggagtggtgaagtcccccactattactgggttgcacctatctcttttcttagatttaagagtaattgttttatgaatctcagagctcaagagttaggtgcatatttatttaggactatatcttcttgttggattgatccttttatcattacataatgtcattctttgtcttttttttttactgatgttgctttaaattctgttttatctgaaataagaatagctacccctgctcacttttactttccatttgcatagaatatcttcttctacccctttgagtctatacaaatccttatgtgttgggtaagtctcttgaagacagcagatatgtggtttgtaattttttatcaattctgccaaccagtatcttttaagtggagcatttagaccatttacattcaacattaatactgaaatgtgaggtactgttccagtcatcacgttggttgttttctagatactctgttttcttcattgtgttattgtattacaggccttgtgagttttacgctttcaagaggttctattctggtgcatatctacctttcgtttcatgattcagaactccttttagcatttctcgtagggatgctctggtagtgacaaattctctcagcatttgcttgtctgaaaaagaatttatttctccttcatttatggaacagttttgctggatacaaaattcttagttaacggttttctgtttaaggaggttaaagataggaccccagtcccttctggcttgtaaggtttgtgctgagaaatctgctgttagtctgataggttttcctttacaggttacataacgcttttgtctcactgctcttggtgacatcttttttgcaacgaatctcctagaagttcttttttaattaaaacactttttttttttgtgggtgcataccgggtacctgaaatgttttgatactggcatgcaattgtgaaataagcacctcattgagaatggggtatccatcccctcaagcatttatcctttgaatacgatccaataacactcttcaagttattttaaaatgtacaattaagttattattaactatagtaaccctgttgtgctatcaaatagtaggtcttattcattctttttattttttattttttttgacagagtctactctgtcacgcaagctggagtgcagtggtgtgatctcggctcaccgcaactgatgagaaagcaaaaaatgtccatcaaaatatgaatggataaagaaaatatggtacatatacacaatggagtacattcgtgtgccatatctgtttctactcatgctgttttccttctctatcctatttcccattttatcatcttactcatccttcagtgagttagctgtgcatgggcctatcttgccagctagattgcaatcttgttgtgggagatagagtgttttactcatctccgaacctactatgctgtatttattttaaaaatatctgatttcagttttgtggttgtatgaggttgagtttacaggaaatctgacttctgcataagctacatatatcgctaggtcttcaggtgggctgtcagagaacttcaaagtactcactgacatatttattgagatttttctatggaccaagcatagtagaatgaattttcattcacatcttgaatagtttttcaaacttctttatgttgtttttcacctttctctcgtatctcctttggtagcttaataatcaaccttttgaattctttataaaaagatatttcaaagatttcatcttggtttagatcaattgctggagagctaatgtgatcttttcaggggtgttatagaaccctgttatgtcatattgccagaattgtttttctggttccttctcatttaggtagaaatatatggaatgcttcacgaatttgcatgtgagccttgcacaggggccatgctaatcttcactgtatcattccaattttagtatatgtgctgctgaagtgagcaccgtctcaattgttttgaacagaaaatctttataaagtgttccacagaatatactgccttctaagcagaggacatagaacctaaaacagtttccttgatatgagttatcattatttttattatggatggatgaatattgtttttagttaaattaaaaagtcaaaactactttttaatatgagtcaacactttgtttgtaaattgatatggtttggtacatgagtgacagcttaaataagaaattcattttgttagtgatagcccttgataattacatttcattcaggagatgaaagatcaatatacaaaactatgacatttctcagtatttctaaaaaaaaaaccaagtaaaagatacgcaaattaataactcagttactagctcttgtataaaacaggagcataaaaaactcagtgatatgagaagttagggtggaaaataagattaaatcaattcactgataattctgacatttcaaacctttaataattagaattatttctgaactctacaagaagtattgaaagtctgcttattactgatcagaaagagttgtcagtaaaattagaacttcctttaagtttacatatctagtctactataaaaacctaaaatatcacagtcaagtgataaaacttacttcataaaataattcatcttaaaatctctggggaaaaacactaagatttctatataattttgttttgtcaaaaatagtcgtaattacatgagcgatttttaagaagtcaaatctcaaatagcagaaacgggaatatgaaggttttgaatacatcaatgtaataacatttcaagacctaatgattctatgagttgctggaacaatcagtctgtcaaaataaatgagacactactacaatgaagcaaatggtcttacatgttaatgttaacacatttagtcaaacagtcaatcaagagaatcctaaggtttgctgtgtttactgggaaaacaaactcttcctagcaactgtttaaataaatcttgcagatgctacagaccttattagtggcctttgattaaaaaaatatgggttgctaatactgtatcctgactcatctattttcccatctgctagcaattctaacaatatgaactatcaacagaatggctaacaacaagaattttctatggcagttttgatgctgaattgcctatagcatttttaagatttaccagtgcatgtctcagactgttttgagtttcttgtggcctggagcaacatactcttttttcccttaatattccattttagctgaaatttttactgtgttgaacagaatcttgtttggttttagaaaacactgttgatggaggctgccacacatttaactaacaatgagaacaggaaacacaacaaagcactagtaaaaatccagtcaggtccactgattggtttagatatacataaacaggcaaggggccttttgcccataaggctgagccacagggataacaggtagtacttaaagttaaaaaaaaaaaaaaaaaaaaaaaagaaagaaagaaagaaaaaaaaagaaaagaaaacattcatatattaaggcattttcctgatttaattcctggcactgagaagcatacaaaaaaggagcattctagtcaatccaaactactatgaagcctgtttaaagaaaaccctacatatacatttaaaatatgcatttacaaaaataagatagtgataatttcaggcacttgataacactatagaagaaaagctgaattcctcactgtaaaaatgtgatcttaaaagctgcattaacatcaaatctactggcagaccccccttccccaaacagacattatttatcctgttctgagctgagaggcccaggtcttcagctgactgaataactaaaaatattctgggattacaattggaaactaccatgaatcattctgttttggctgtttaacttcagagcacctagaagaaacttaggattctagattttcattcccaaagaaaaggaagaatacggtttctcatgaatatcaatgaaggagtaggagaaagtgccaattactgattatttacaatgtgctgaatactatcctaaggtcctgtacactaagtcattgaagcctagcaatcaccttagggggcagatattaccaaccccgtttgacaggtgaggatgcttagagagatcaaatgatccaccctaggtctctcagctagaggtgcttatgtaggccctcaaaggcaacatctaacccacataaatttgaactgcagtctactgatagctgtttcatgggtttcccatgaactacaaaagcactacaaaatccaatgatcatgtgaaacagttttttcacaaattgtttataggttaaaaatagaaaaaattacttaaaaatcccaactttcctgtcagattgtacctggtgaagcattttacttataagctattcatgtattttagccatcactggccatatgaaataagtgcatatgtgttaattaagcatttttctatttaaccagctctttagccaaagaaacacatttctacatagccctttgggatagatttcctaatgttatcaataaatgtaacagagataccctgacaaaaccaataaaacatgtctccttcacattccagtgagactttgcctatgtctgttcagactgttccacagttggtttggtgctgtgtttaccttgaatctagtgcaggagttacaaactgatgagcattactataattatcttgtcttagagaaatctcggccacccatttaaaaaaggaatgatgaaattttcgttgcattcctcaatggcagctgagcacccatttcttatgtgcattttccgtttctggtaagtagctttgcttattaaaaatatcaggaaatacttaatttgggcacacttctgatatattgtaagcagctctaacattctaggcccaggacaacaaaatttaagtaactcaaaagcaaccagtaattaaatctttctggatctattaagggcagatgaaaaattgtattacctttgatttcttatctcagcgattctgattagcactttgaatagtttaaaacaccaatgaagccgtaaataagaggttaacaaattaagtgattaattttctttttatacttcaatttaagaaaaacattatatgagaaatatttgttatggaagatcacaaacattacaaaaacaacagtggttaaagtatatctgtaactagcttactgggtagtcaaacctctgtggagcaataatataaacttaaagtaatttaatttttctccaattacactctttcggctatgcaaagtcaaatttccttgacatatcccacagtaaatcttgggatgatttcactgatttctggtcacttttacttattaaaagtccagaccaaatataaacttcaatctcttattaagtgcaaattttgtcccttcccttagcatgagcttgcaccaatttacagtggggaaggatgatgtctatatctagaaccttctcgccgtctctttctaaggtctggttcctctagtgctgggagcaggaaggagaccggatgttattatgtaaatggtgacttgtcagtgaggtatgtttccctggtcttgctctggtttgtttgattactagtggtttgtgcacagaaagcgtgtgtatgtatttcctgatgttgtggttagtattatcctagtgcccaccccttttatagaggggctgcccaacatcttttctgagttagatattgtctcctctgacctgaaagccacctgggcagcattatgacttctgacctcctcttttggagtaaagagatcatggaagttctctacactctccagggactagtgggacccaaggaaggtaagggtcactactccaatggcccttagttatcccgcaggcctcggctctacctacagaagtctcctacctacaaaaatctttgggagagaagcagatatcagtgtctatgctaatataccttccaaacttccaggaactaaaggctctgcctttagtggcacaccagtgggtctacagattcagctagctcagtaagcaccttgctggggtaccaggtaaccgtatccctttcctgcaggcaccaccattctctgtgaatggatctctggaaggctccttatttgactttaggtaaggagagaactattttcttcccctcccaccaggttataaattccatttggatagggcctttgtctagtaaacagctacatctctagtgcctagaacactgcttgaaacatagtaggtgcttaatcaatatttattgaatgaatgaaaaatggtgggtctcttagtaatcgctggagggaggcggctggcttcagttgttggtggcatgctttagaatatcgggtacttaacacctgctgttttcagctgtggactctactaacaattttgtggtaacagaaagtcccttttgatgtcatagtacacatctattaactctatttaaaaaatgtgtgtgtgtgtgtgtgtgtgtgtgtggcatcaagttggtaaatttgcagttgaagtaaagcaaaaagagtatctgtgaagatgagggtattttttcagcatgtttaattaatattactacaggatagtttcatgctccactacatgtttattctgcatgtctgatgatacatttatttcaataataaggggctcatccttttcttagaataatggcttctctcaaaaaattctccaaaacaataataaataccatagttgactctttgaggaaacatgcatggagtgaagtgtgctggaagagcatcattcttactaatgtcacaattttctgcttcactgacatcacaatacttagtctaacaatttaaattatactatcttcatatcataaaaatgtaaatatttgtttcttgaaaatctataaagtagttttaaaatgaaagaggttagctaaaacccacaaatcatgcaatttagattgtaatagataatttttaatagtgaagcaacatctagaaataaacaagagtctcatattttagtttcgaagcatctaaatccacagttcatttaaaacagttcagaataagaatcgtggtctgttaactatttttaaaacaataaaactcaaaatatgccaaaatgtttctaaaacacttcaaaagaaaaaataaattcgatcatagttctgcattctcacttgccacatgggccttagaagataaaatgtaccaaaaaggaaacattttagcattctcaattttagaatggcatggtttgtggctgaaacaatatttaattttcccagctactgacagacaaatgtacaaattaaactaaaacacccatgaagagattcagatatttgtaaggacacaagaaaaaaggataggaggctcttatgaaaatgtttaaaaagcaaaattgattttgtctaccttaataataaataagctgtcttgtgcaaacttaaaagcaaaatcgtcgcctgaatgaaactgagattctattgttttttcattaatatttgttttaaaatatgctcacaaatgctatgaatttaaggtaaaagaaggtagagaatgagaataaatgaacataagtcctgctagttattaacttagatgtgtctcatgggggaagaatcaactttcaaatgtaaatgtttcaaatcttcaactttctgaattggggaaaggacaacagtgtttgtgggttatgtcagcattttagactgcgcaactaatatgcagaaatcacagaaaataaagatgagagccgggcatggtggctaacgcctgtaatcccagcactttgggaggctgaggcaggcggatcacgaggtcaagagatcgagaccatcctggacaacatggtgaaaccctgtctctactaaaaatacaaaaattagctgggcgaggtggcgggtgcctgtagtcccagctactcgggaggctgaggcagcagaatcgcttgaacctgggaggcgggggttgcagtgagctaggatcgtgccactgcacttcagcctggtgacagagtgagactccatctttaaaaaaaaaaagaaagaaaagaaagatgagaaagtaatatgccaccattacttccaaaaggctgagtaaacattgattacaaactaaaattttcacacttagatgattataatacacgaatggtccaaaaaggcttttctttgcgggggcgggggggcggtctgagaatggcgccaaattagatttttagaaactgtttttcggtatcaactaatttaatagagaacatggcatcaaaattttatctctaataataccttgcaaaatgagtgtgttcccaaatgttcctgcaagtcttcagcgctggggctggaccaagctgcacctcttgcaaaggcagcaaggctttggttttatcctcccttgagccagacacctgccttctgagtggcctcactactaatgtggacatggaagcagaggcagagaactgaggttgggggacagcacaaagaatggctgatcttactttacatctactgggaagccgggagactgtggtcatgagtggaaatttggggatcagaatttcagctctggtttgaataatatacattaatatggagtagttttgctagtaaatcttcacatttttattttacaagatgaaatttcagttcagtcttaaaaagtccattttaataaggataaaaggaaaaatgcatctttaattattgaccatatgaaagacatattgttggtttacctcctgtggaaaaagtaataacacagctatgtggctgctgaattcaatgtgctcttgaggaactttccaaaaaatattagtaactgactgacatacactgttattcaaggaagagcttatccactggataattattctgaaactggtttatattcacatacaatatatgtaactctcaatctgaaataaatgacccagcagacctagtgctgagctgctagtacctggtactaacagatcctagaattctccaaagcattcttagacaagaacaccgtgagtgaactttccattattagagtcagagtagcggtgcaataccagaaatgatcaactaattttgaaaaataccacatgcaaagaaattaccttcaaactgccaaaaacactgcaagctggtccacacaacactgcccatttctggatacccatgatttacctaagttcttctagcctattttcagttaggaatgcccatttgaatgaacctcctcctgctacagttctcttaaccacagtgcatgatcttgtgactctgtcaggtccaccctagccctgccaccgccaacccacagatctcttctaattaccccagttgtgagagacagtcatagtcttaatcattttcttttcacaggggtgttcactgcctcatctcacccgtactcagtacaaggccttttaagtaggccaccctcactctcacagttgtttctatagtcagaatagtcagctgtgctggaccaagctgtcaaaagaagggagagataactcttaaatactgaggaaattgcagattctgctagctattttttaatttttcaatgaccagaaactgtctttcattggtctttagtgagtgtcatccttaattatatcaactaattttaaagatgacatttttcctagacaattttgctagggtgacagcataagcttccccaacccttggtaaatctctgctctaagtataaaaaacaagacactgtttactgactcttaagaggtgtgggtttttaatcttgcagggtgaccaagtgttgaatatttggtaacaatttcgtaaaatcttttatatcccacttagaaattaactgatagaacacctgagggagagtggtaaaagtggaagcagtacaacagaataaaattaaatgatcctaaatcaactgcaatgtaccaaagccttctgaataggcaggtggcttctgaaaagggtaagggtgaatgaagttacagcttgactggctcagagagtttataggtttgtagaggatgagtggcttacagctcgatcactggctcctgaaaagttaggaagctgggccactatcagatcaatggtatcggaaactgagaaacatgaagtcactgagctctacagatatgaatagtggcatccactgaacccgctcataagggcaagatttcaacctctaagagagggctaagtcgctggctatacagtaccctctggtggccagatttgacactgcagatttttctgccttttaagaaaagaggcctggtttttttccttttcttttttttttttttttaatgcatagacttaccattgggttacgtcttgataaagccatcataaactaaaaatatctgcatttagtacagctaacctaccaaacatcatggcttaacctagcctaccttaaacatgctcagaataattaacattagccttcagttgggcaaaatcatctaacgcaaagcctattttataataaagtgttgaatatttcatgtaatttattgaatactgtactgaacgtgaaaaagagtggctatacgactactccaagtaccgtttctactgaatgtgtatcactttcatatcaccaaaaaactttaagtggaaccatcatatacctgggactgtctgtaattcaaaatctttctagacaaggaaggaatcaccagtagcactgctgggctatgggtaggtgggcaactacctactaggtgtaaatctgtcaaccaaaaaagtaaattatggtggctttaagggagaaaatgttcctctgaatgtgtttaaaatcccatgggtgtagctacttaaatgaagaaatctggtgagtacttagctatttaaaatttaattctttgcaggtacttactttacaagaagtattcttatatagagagattcatattgctataaatatgtacataatagctaacatgcgcttaccactggcagacactatgctgttatttaataggcaataatcctatgaattagtattattagtatcaccatttttcagaatttaagttttcagaggcaccaagagtttgaactttaagacatttagctaataaaaaaatgtggccaggatttgaatccaagggaactgaattttggagctggcactcttaaacactatacaatgcagttaaatatatgtagtttactgcccataataaatttttccaaaaaagagatggcttcttaaaaattttaaattagattcagattagtatagacacttgcaagtcaatgatgcttaaaaactaaactaaaaccctatgccagttgagtgtttatttcctggaatgtttactcacatacaccttatggtggagaggggagtttataattggccacagagcctgagacctaatatttttgaaatcataatatattttacagtacttcacaatttacaaagcatatttacatacattgtatcacatgaacctcaaaataatgctgtgaaatggggcagataattctgtaaacaggcattattcttaactttatagatgattaatgaggcttacaatgataagtcatttccttaaataacacaattctctcaaaatctaagatgttccaaatgactgaatgcattatgaattagcctatcataggctttatcatctgtcacataacatttaaaaaaagatttctcacaataaaccaaaataaaattttactttattttatttctgctttatctacaataaatattataattcaacagtaattactattgttgaactagcaaaacccacataacaaaataaaaatcagaacatgaaaagctatagtaaggagaatgagaacaagtatggatcataaaatccagaattaggagcgaaatggtccaaaaattatgagattaagatcaatgattacataaagcactcagcatttttgtaattacttaaatttgtaaagtgccttcaaaaatttgttactcttttataatccctaagagatcactgagagacaataatagcctttacacagcagatgaagaacattttgaaagtactatgaaattcagttattatttttgtttaaaagaaaacatcttgtgattctaaatcacaagagcccgaaattctttctgaatataagcaatgccatttacaaacattcctgctgcacccatcttctacaccccctgttgtaatgaattcgcatacctgcctccgattacaggctggattgccccaaagtagtcttctcagaaacctatctacacagttagcttctttctcttgtgcatcttcaaactctctttgtctttagcatcaacatgatatactttctgatatttcccatcttaaacttttattgttttttcttatctcaagaaaaccctgccttgactcacggccattcctccagttgtcacaattccatccctcttctcctttagaaagtcaaacttctcaaagtatggagaaaacaataaccatattttaaattggcaatcaaacttcaacttgctccatactggcttctgatcccctaatgctctccaaattcctcttgttaggtcgccaaagttaaatgaattctttttagtttctatcttatttggcccctccagctgtacttgatactttgtccacacctttccttcttgaaacctccctctcttggctcctacaacaccatgctctcttttctcctaaatttatggccatttctcaatctcctttattggcttcttctcaactactaaatgttagaactactcaggactctgggcttttactatatactccatttcctaggcagtctcatacatgccctgggctttaaataccatctatctgatagtatctctaatatagatctgtcttctgagttccagaacttagcaattctattagatgtctcctgggtattgcaatactcagtaagttcatatctgacagagaccttctaaactgtttatcttttaacctttcctatttcactaaatggctcttccaccatccaactagttgcaaatgctaagaacctaccatattcaaatgttgccatgccttgtggtgttcatactacttaccaagatatgtcaaatcgatgtcctcctcttcatctgctgtcatctccccagtcaaagccctcttatcttgagcacactgtttcaatagcttcctaactagtttccttctatctttgctcccctccaattcactctccatacagcagccagaattattgtttaaaaatgtatactgggtcatgtcctgcccctaagatacggaaatggctctttcttgcatatgaaatccaaatgcggccttgcctgaatctaatcctgcctaggtctgcagcttcagcttgtgctactctagccattactcctatgtttccatcatgactgattctctttcagtttctcagattcaccaagctctttgcatgtgaattgggagtaaaatcgtccaaaaattaagaggttaggattaaatgattacatgcctttcctttgcttagaatgttgttccacactccccactttggcttcaagactttgttaacacagttctgtctactgagagtgtcctttccctcatctctgcctgatgaagttctattcatctttaggactgatcttaaatgtcatcttcataaagtcttcctggtcaaattttccctgtaagcatactgagttacttttttctccatatacctaaagataattttgcatatgtctctgttataacatttatcaccgtactgcaatcattttttaaatttctgccacattagaactgtacaatatgagatacgtgaatataggactgggccttctttagatccccaaatttagcaggtgcctaacatcatccaatctgtcacccattaatattgctttaagaataagagccatcttacatggcaacaaccactagtgaagattgtatttattaacttgttagtgtttgtcatcacggtgacatacacatattcagaaaaatgagtcaatattaataattaaagacgttactgtgatgaagtttcctgaaatctgagctcatctgtatacccatatccaatgacttgaatgtctcaatcaattcattggctagcacaattctcaagccttattagggaccataatttctatggttgacatcttaatgctgagtaggagccggaagctttgtggactctcaggttcatgcacctgaaagtcctgtgcttaagtgtgtgcatgatcttgctcagaagcaccaagaacaggggtgagaagagagaatgtagaacatccattgttatacaagaggcagtgacaacagagatggcctatttaacttacttcaaaagcctttaattctcaagcaccaggaaaacaattttagagctgactacaatagatcttttgctagactgttctgaagactagttttttagaaagtaaaaccatattaccagaatattaatccacaataaggttgaatacaatttgttaaagaacagactccatgtactattacaaaaatgaggtctgacctgaaacaccatccatttgaaatatttaaaaataaaaatagacaactctcttaaggaggttttttaaagcatcatctgatatctacgctatgataaaagtcagcatcaagtttaaagaagtgaaacaaaacactgtcaccatgcccctatgagctaaaactttgagaattataaatggcggatttaacaatgataacctttccattcttttgccagacgcgaaacaaattatgctagttcctcctctagaatttcttgctttttctgcctatgaccttctcagctcacccacaagcagcaccattcattgactgaactgttatttgacagtttgtcataatcaaatacggtaagcagagtatcacgatgttctagttcactttaaagcaaactatttaggactataaattccatctaggccttagatacacttcaaggcaaaggtagggatactgggcagagaaaacaccaagatttgacttttactccaacatgtacctaagtgtagactggaagtttgtattcaaaacattgggggagaaaagtttaatgttacctgtgtattcaacatataatatcctctgttttatccagataattcatcaaaatcagaggcatgcaaggaaggtgagaatcaggctgtgatttgcttacagatatgaaatcttgggagcaactcagtccagtgaagagacttttattgccccacaaactctaatattgggcagacttgggtttttactggttaggtgatgaaaagtccaaggtaattatcaggactaattagaattacaaaggacactgacacggggtcactgtaataaagttatactttatatttaccagcagtcttagacggctatgggtaaatgttctggctctgcggccccctgaaaagcaggattttcattccaacagaaaaaggaaaaaaactgattccaggtggaaccaatgttgcttccccacccttttttcagttcagagttgacaatcatgttataaaatgaaaaaggcaaatgcatgaacagattttagtgttgcataaaacaaaacttaccacaaaactaatgtggctttgttaatgatatgaataatagattctgggtaaatggtaattattcataattaatttcatttcaaaaacagccatagccaaaattatttttacacagtcaactcaaaatgtttccaaattctctaacatctataaattaaatcactcttgatgatttccactacaaccatgcaaggcttaatacttttacaacaaaggaatttagaatatgtcaccccaaaatacattactctggcatactgactattttgagtaaaaggtacttgaaaaacagcaactgcaagaactctctgacctttcttcttcataaaagcaggaaatgaaattcccgtgtgaaagacagcctccctctaccagaaggaaagcatcattcttatcatcaaggacgggaagctgagaccgaggaaaatctgtacaaacaaaccttgttaagctaacccttatcttcctcgttacttctctgcccaattacctactctgcccaagctcctctgccttgtcacagtttcacaatttactactctttcgccaaaagagtagtaaattcagtatataagttttcaattctaactgcatctgtgggtcttcatttccttacaaaggctccttgccatgtaaaattcataagaaataaatttctatgtttttctcctgttgatctatctatgtcaatctaattcttaggcctagctgaaataccccaaaaactggtaaaggtacaatttcacctcacctacaacacatacatatcctttaaaaacatctttctcaaccccaactccctagcagccatggtgcaccctcaatgtccgtgtttgagaattaagggttcctgagcttttctcctctgcaaatcccactcatgggtccttcaccaaatgtccattagcaattcattcagccatttcctatctcagtctccaccagaaagggccacccctgcagctctgaaatgcttgaggggcttgggaagctgaaattctgtggtataaggtttcaatggctagcctcgcataatcatcacacttggcggggggggggggggtgggcgggggggggccctaatgaaggcaagggagagggaagggaaaggacacagagaaaagccttcaggagtctgtttcagggcatctcagtcttggcactaatgaacgtttggtggggtcaggggtaattcttggttgtgaggggctgtcctgtgctttgtaggatgtttagcagcatccccagcgtctattcacaagatgccagtagctttccccaagtttggacaacccaaataaatcacccctggttgagaaccagcagtctactctagagtcttgagcatagagaggtataggaagaaaattaaacagaggaaagaacctgaattcagacagacccctgggctatgtgtagaagaagcaagtggctcttggtcacatgctgctctttgtgaacatgactcaatgtagcggaaatttgagagtgagcacaaggacaagaggaatggaagtcaggaaatgagaggaatctgtaaggaagaattccaacccaaatactctgcccctcactcacaaggtgatccctatgtatctactgaagagtactcaaactctttttcttaaggcgctggtttataaaggccatcaggaagcagactgagatttgggggtggggtggaagaaggggagttgggaggtagagaagggtttcccctacctaaactaagcttgggcttaagatccatcgagttcgcctcccgagcagagcaaagaactgaaacatgcgagagggttgctgtgaagcattttagccaacttttccaagccagatgcctggagttctcactgaggaagctggcagaacctagaaaaatccttattactccctcaaatttgcagagggacttcagatgactaaaactagctgcaggaaagaaaaaagacattttcttttctgcctagccatttataaagttttttaacttgcagaaaatcactgaagttctttcagtttcggagcctctaaaataaagtggaaatactataaacacatgtcacagagatgttctgaagattacatgagaccacagatgttaaagggcctagcacaaaggtggcataggtggctccctaccctctgtctctccttcatttttagttttctttgggctcatgcaccacatgcccacatctgtgccaccagagctttctctatctgctcttatacactatatttacgagcttctgtcgttatcttgttctgcgattttcctctctccctatgttcctgatgaggtggcagtggtacttgctgctaaatacatctaagtcctttcatcactggtgacaagagttcatgtgagaggtagcagtggagaagatgcaggaaaaagaatgccatagtgaggatgacatacttcatcactgttttacccttggcagctctcactccacctgcatgaagacatgaaaaaatctctttctgcgtgatagtgcaggtgtgtagtttagcaggaaacttgacaggcagttaaaagacaaagaagcggccgggtgcggtggctcacacctgcaatcccagcactttgggaggccaaggtggggcggatcatgaggtcaggagttagagaccagcctggccaacatggtgaaaccctgtctctactaaaaatacaaaaattagctgggtgtggcagtgggtgcctgtaatcccagtgactcgggaggctgaggcagcagaattgcttgagtccgggaggtggaggttgccgtgagccaagatcctgccactgcactccagcctgggtgacagagcaacactccgtctcggggggggggggggggcgggaaaggtgaagaagcatatcaggagttcagcttttgctaggtcagagaaagttcttaacagactaactcttttgcagataataaactgtggacaaaacacaaaaaccaactactgaagtctctaaagaatgaacaaaaacacattcttccccctccacaagaaaacatttacaatgtctgggatgtaatccaaaattacttgacatatgaagaatctggaaaatgcaatccacccccaatggaaaagacaatcaacagaagccaaccttgatacgacccagatatcagaaataacaagactttaaagcagctataattactgctgaggtaagagaagacatgctcattatggatgaaaagaatgggaaatctcagcagagaaactagaaatataacaacaacaaaaacaaataggagctttaaaacttgaaaaattcaatatctgaaataaaaagcttactggataggcttaatagcagaatgaagatgacaaaaaattgattggaaaaaggtcagtgaaaattacccaatctgaagaggagagagaaaaaaatttaaaaagaaagtgtttcaggaccctctgaagtcccagaaggtggggaatgagagaaagtggtgggaaaaaacatcagcataaattatagctaaaaacagtcctaaatttggcaagagataaatttataaattcaagaagctcatgaactgtaaagaagattaaaaacaacatcaatcacaaaaataaatgcctaggttgatagaaaccaaaaataaaaaagttgtgaaaggagacagagagaaaaaaacatatacagggcaacaattggaatcatcggacttctctttagaaaatatgaagtccagaagacacctggaacaatattttaaactttctgagataggagaagcacacttcactttaaatataaaggcacagacaggttaaagtaaatggatgtaaaaagagcatgcaaacagtgaatgattatcgtactaatattggagggggaagcatatcacctgcctagctgccacagtatgatttcaaaaaaaacaagaacattcaccaagaacaaacaaaaaaacctcttcaaatagaccatggaactgaattcaaacttgtatctgataacagcgatgacaatatctctctataacaatcctgaccagcatatatcacaattactacagaggctactgacaagaaatccaaccttggtatgctgtacacgactgtcctcccaccctcccagtgaaatcaaacaaaattaataatagtctactacatcagagggactccatttgggggaaagtttcaggctatgctcttgcctcaaaattggtggggaaaacacatagacatatacatacacacaaagcaaatacagcaaaatgttcaaaattgttgaatctaagtagtaaatgttaagtgtttattgtactatttttcagctttttgaatatattaaaattttttatactgaaaaaagagaaaaattagccagaagagctttattcaaaataccttcccctctctttccttcacattttgatatattcttgttggggaggtgtatcaggatattaactgtatcttttgatacgaaaaaaagtcacatgattctggtatatttcaaccactgctagaaaatccacatggataaatgctagaatgagggctaggactttttctagtttgtccattactgcatctagtatattttcaaggaaaaaatgttcaatgaataaatgaaaaatagctaccctagatgtttaataaaaaagacatctgcacttgtatgtttactgtggcacaattcacagtcgcaaagatatggaattaacctaagtgctcatctacagatgagtggataaagaaaatgtgttatatctatatcatggaatactactcagccataaaaagtaacatcttttgtagcaacttggatggaactggaggccattatcctaagtgaagtaactcaggaaaggaaaaccaaatactgcatgtttttacttataagtgggagctaagctacggatatgcaaaggcatgcagagtggtataatggacattggagactcagaatggggatgtgggactgaaaaaatcacctactgggtacactattcgggtgatgggtacactagcagcccagcttcactattatacaacttgcccatgcaaccaaaaaccactagtatccctaaagctattgaaaaaaaaaaaaaaaacttagtaagcctcctagactttataatctcaagacacgactttttaacataaattctgaacattatctggaaaaactgttgactggaatacgtttgtttggtattttttcaaggatagaatgatgttttgataatcagacttctcctttacttgtcacttagtaaccttctatactaaaaaaatttagtcattgaagtgtaacatgtattcaactgaagctagttgaattctcacgtttctcacactccccttgagctggcatcaaagattaacttaaaaggtcatgaaggaattcaaattcaaggaattcaaatttccagcatgcccatcttgacactttgaaataaatataaacacatcctgatgtcacttcattacagcattcccttcccaaggagctctaaaaagaaaataacctgcaggtgaatttttgacatgcaagtcttgaagataaaacaatatagcattcttccagatcagttatatgctttaaaagcattatttctccctgaataaaaatgaatccaaaggctgtgattcctaagaacaactgaagttaaagctaaatgttctcaaaacaattttacatagctcattctaaatgttctttaccaacttttaaataagaatgacaaataagagacagtcaaatgtttttatggatcttctgaataaactacgtaaagataaaaaatacatgtaagtataaaatacaatttgtaaatgagggccgggattagcaatgccaggatggataaagacatgttttctcgcatttaggtaactttgtcccctatgagatgaccctcagaagttgtctcgacgtttgctcagcagtgatttgattcaatgaccaatattcaaacagcactcccttagagactctacgcatgacctctgactgcttggtgcctaactctccacatatgtcaaacagagggaagaataattgctagctacctcccagcaattctagaagatttaatgaggcagggagccagacctccatggtgagtcaattattccctgggtagaagttatgttatttgtgaggtgccgtatttctaaggataacagagtattgtacaagcattacaaataggtatttctcgattcctcaaagtgttgacattaaatctttcagaataatatactcacctagtaacaaatagtctaatattttataaaacagtttgaatttgatggaatgaaagcatacggattttataatgttgtttcttttctgattattagtgagagagaacaatcttttaggacaaatgggtttaaaggaatagacagataagggagaagctctctaactgaatccagacctattaaaatggcgaccaggtaccatgacctatgtatttcattgagctggggccaagtccagagtccactaatttcagcttgctcaagtcaaggctaggatgctgccgtgatagaaaagatatggaactgctgaagaaatgtaattcaattcttataaagaaatggggcccaatattaacttacatgattaatataacacacataaataaaggcagtaacaaacacttaattttggattagtgatgtcacaggatctttaaatagttcatacaggatggtcatgctctcataagttaaaatggagaaaattgattttttacaccagattagccacacaatattaatcatataaaatgtttccctgaaagtcttggcataaaaatgggccaatgtgctctgttttgcctttttccccaaagtaaatttagatgggggtgaggagggaaaactttagaaagcaatcacaaatttcaaaatcaataaattcaaattgtttttaaggcagtaaatacatagtcctgccaaatgctgcaggaaattgatgtacaatctgtctggcagttggaccatgtgaaaaaattttaaaaagaccttaaaataaccaagattctgaaggctcaacaaactttgttttagtaagacaattttcctggtccataaaaaagataaggaagtaaaaggtgggataaccaatttaacttagggtgtggtgaattatcttgggtatcttaaattggtacttaatttggtctgggctcagaagaaatggtttaccatggtgattaagaccagctgctaggtgtcatagatttaaattatacaacagaacacaggagtgtgtttgaacacagacgggtaggacagtctccaaaaagctaagagtgccacctctgttcagtgaaaattaagtcagttttttactaccctttaagagctgcctccactgatttggccttgaacatagactgaatgagaagatttagtttcccaacacatgtgccaccatgacttaaagacttaatactaagtctttaagtattaaagacttaatactaagtccactaagtagacttagactaaagtccactttagtctaagtcccacaatttttcagaaagaccaggaggccatttaaacaaagaaaataatttctttcctacaaaaatcaggggaaatactaacctttgtcattcaaaatagttttagtttgataccaaagtatccttattaacactttgagcagggacaccaacatattttattttattgttcacttagaagttataaaagtagtctacattaaatgaaaaaattcaaacaataccaatataaaaatgtactaaatagtgtaagttcacttttgactctgaacccccagctaccaaactcaccagggaaaactactgtgatttgttgaagtgaagggagcgaagagtccacattaaattagaatataacagtacaagtttatggactttttacatcaatatatgtactttcaatgtgactaaacgatttcaccatttactatgctttttctttttcaaagtaactataaagacaggtacctttggggaagaaaaaagaaaagaaaaaaagtaaatataaagaaaacactggaactagattttcaatggtgcagttaataaggattagaaaatactatatataatagaaaatataagatttaaaattttaagatcttcttgttatgacaaataatatctatatgcataatacacatatgtacatgtgtatacatacatatacacaaactacatattacagcatacaaaatactgagtaacacaatgaatatgatctttttggatattcttgaaaaaagtaaacttcatcatttgatttatctagaagaattttattggccgggtacggtggctcacgcctgtaatctcagcactttgggaggctgaggtgggccgatcacctgagatcaggagttcaagatcagcctagccaacatggtgaaaccccatctctactaaaaatacaaaaaattagccaggcgtggtggcacacacctataatcccagccacttgggaggctgaggcaggagaatcacttgaacccaggaggcagaggttgcagtgagccgagattgtgccattgcactccagcctgggcaaaatgagggaaactgcgtctcaaaaaaaaaaaatgtatttataaatctaatgctttagtggcagaccaggagacaacccacatacaagtggtcaatttgaattttatctagaaccattactgttgccctgaaagccagattcactttagtcagctaaattttatggagtgtgttttataaacaaagcattgtatgaagctctagaaaatagtcagcagaagacagtccttcttctcaaaggctttccaacacattatcaagaacatacacagtcacaagcaattacaatttgaaagtagcacacagataaagaaattaattaccactggtggggctggagaccgtttaacagaacagataggtttaagctgggtaagatttcaactagcaacacaggaatgaagggtgcttgaaaacagcacagaaaggcacaaggaaatagtacagacaattgtacaagtaaagacaaagaagtaggaggctgccatgtacatgtgaaggataatgaagtggcagggcaagactagagttcgggggcacagagaaggcaggaatagaagatgagcctggagaagtagatgggggcagattttggagcctattagctataaaccaaaaaatttagcatttatattacagaagtagggggccatgaaagtctcaaagtgaatgacatgatcagaataatgatgcatgagttaaaatggaaaagaacagttaggcagagtacgacccatgacaaagctccaaagaagaggtaatgttgcgtagattaaggacagtagcaatgaaaactggataaaggaaacagaccgaaagacacattctgaaggcaagttgacataaggaaaagatcttaggccccaggctaaagatttgaattctggctcctccaactatttgccttttggcgttgggcatgtttcttagctcctttaacatatagtttccttatctataaaacaggaataatgcacttgcctgtgtgtgggggaaaaaaaactgtgagaaaaatacagaaagttgtctagataattcatgtcaacacacttatttattcaacatcatataatgataaaaagaataaaacgtagccccaatctggttggggaaacagacatacaaacaactaaagtgacaatgatctgatgtaactggacctatattaggagtaagatccaacagaaacacagaggataaggtgtgtgtaaagccactaaagaccgtgtaaaagtgctgaaaaggttcaatgaagttccacagaggtgatgtgtgaaccaggctactcacaacttttaatgtttcttattttcacatcaaatcaccaggtccttcaccacataaattatagtacacaaccccctaggacccagtggtatcatttgaattctggagtgtgaaagtccaaaggaaatggtggaggaaaaaaggggaggtgaggggagaggaagaaagattagaggagtatgaatgaattttaggcaaataacttctcaggaaacaatacttgaaagaaagccagataatacttagattctcagtgtgatacaatattaaggcagcaaaactcaaatgaaagaatgtaatgagttccaggtgtcgtttagtagatttttttcagtaggtgaagttgagttgaggtggctactgtcagtgtcaatgccctgtctgaacaagttttaatttaacttcaagcaatacataggcttttgtttagactgtttgcatatatttgtctactgctgctaagaggcaaaataacctctttctcgagaaagtgagataaaactatgattgcaaaaatgtttattttttaatcttttcatgaatcaagtaattttatctaatttattcaacaaatatttattgaatagttactgtgcataaggcccagtggggaatatgagagaatataatatgatatagattttatcaccaagaaggtctgagtctcataagttcactataaagtagaaggtaataaattcaatgagaagtatacagataaagtgccacacagtataaaggaaggagattactttgagctgggaggataaggatttggcactggcactaggacagaggggactatgttgtgttactcatgcaacaaacatttactgagcacatacaatgtgcatgcacttacctaaatgcaatgagactttgaggtgatttagtccaattccttcacttaattcactagaaaatgaaaactcggaaacctaaatagctaattcaaggccaagatacaatttgaattgatatctccagtctgcaagtccaataatttctactacttaccctgtcacctccaaaactcagtctaaattttttgtcaggtacaatcattatttcaaaaggcattccattccacttataaattaatttgttataaaatgtgttttctaacatttagttaaaagttgccttcatttttaactaaaaatgaagtggctctagtggctccccctgtagttacacagaacaaatagaatcctgtggccatgtgatcatccttcacatatatgaagacaatcctcacgtcccccactctagtaggcactcagtaatcactatagttggggaataagctccggaattagatgggcctggatgtgaatctcagcttcaacattcacttggtgtgtgatcatgagccaagttacttaatttagataatctgtgtgtttatttagacaatgggaatgtttatgtccttcatgccttccattcaacgtaatggccaataactatgatcaagaattggcacaacttttggtgtaactgtcagaacactagagtttctctatacacattaagctggcactgaatcataagaggaaaagttgcaaaactgaaaaagatggcagcacctgtctttctctcccacttctcttcctctctggcataactagtctgtgagtgacagctgtgaaatactaaagactgggcgacatggcttttccagataacctgtgaagaatggtgaagcatggcttcatcaaatgacctgtgctaatagagctgctggcaaaagtgcagtcattttattgagataaaacattgaaaataattttcataaaataaggcacagatgctttaattagaaaaaaatgtccttgagggtgggattcagatgcagttttataacttgtacggtgccttaaatgcattaaaagatagacaatggtacaaggactattctccctagtggtaacaaaactgtttcctagttactagggtagggtagggaggaaatgaaaggaagaagagaaaatctagagtttattcttttcctgcttctaatgttataagccaatgctaatgtttagtagtcacaacctcgtctgctaggcactgcaactaatttcccgtatttgggtagaaaaaaatgcatcatgtctcaaagaatgaactactgacagaaatttagtgactgatactaaaggtagatacgtagctgcagggtatgagaaagaggagacacagtcctaaaaataacagcaaaactaagatgaaaatgcagagaagtggtatggtacattggtagctatcccctaatatctattctacctttcttccatagaaatatcgttttagccaggcatacagtcattcggaataaaagcaacactttcggtctctattgcaactacatgtagccctatgaccaagtactgacccgcattatatggacgtttctgggcacctttctcaaaagatggctggggcatgcccatttcacccctttctccaaccagctgcctgaagtggagatgcctccacctttgaccatgaaactgagagcctcaccctaggcatggtgagtggtgagctggaaggagtggggctctcgatgcagaaactgatttttccatttttgttaaacaatgctgtcaaaaaggccctaaaaactatcttttgcacatatctatttccttagattacattcctagaagtgagtgagaggatatgaaaacataatctgtcatggaactagagttaaaaaaaaaaagaatatgaaaacattctaaagctcccaacacatatggtgaaattgttcttctgaaagtttaaatttacatgttctctacatgccttcccagcccaatgtcaggagttaattttatcattaattggtaagagctctcttatattaagggtgtgaataccatgttataaatacctcttcccaattaatttacctttcaatttagttactatttttgttgttgtgcagtaacttaaaatctttatgtaataaacctttttaaaaagtggtttctgcccttactattatatagtaaaaagtcttcccacgtatcaagattatgtacatatccacctatattttttctattacctttttgctttcacttaacctttaatccacatgaaatttatttttccacacatttagccgattgtaccaacaccaagattccacacattcaataatagatgctattgaatataactattcctaataactgaaaattccacttttatttattctgatatcttgaattagtattattagactgttttaattattgtggctttagaaaaaaattttatactcacttatgcaattaattcacattatttcttttttttacaaaagtgtgtttggtttacacctctaagtgaactttagaaacacattgtcaggtttggcaaaaagaaaaaaacacctgaaattttaactggaattgtattaatgatcaatagagagcaattggggtagggaatgcataactttaaaacattaactctccccattattcccacaaatatgagatgtttccccatttcttaaactgtttttatgtcccttatgttctatagtttatttcttatagttagtcgtagagtttacttgcttaaacttgaggcaagtttccttagttacagatcttttatttatatttgtgctattataagtaggatctttaaacacatacttgtctgtgctggtatagaggaaacactaatttctgaatttattttgtaattgaccatcatcttactggtatgtttttaataatgctcataagtgttagttgattatcttgggttttctagttagataactgtattttcaatttcaaataatgatgacacttctcacttcctttgcaatatttaaacttcattttcttgtcttattgcattagacaaaactttcaaaacaatattaaataatagaggtaatagctgacactcttttttccacccctgactttacttcttaggacattttcctattttaacccataaaacagctgcatcgtatcagtctttcatctgtttttacactggtcccaacccccaatccctaactatactgtaagttccttgaaggcaaaaactgtgttttgctaattttttaaatcactgtagcatccagcacagtgtctggcacagagaaaataaatcattaaacggatggttctcaaaactggtgagtcactggaattacatgggagcctttgaaaaaaaccaactgcaagtttcacaaaccatttacaagtcagaaattccctgttcgtgggggtgcgaatctagacgtgtcaaaagcttcttagatgatttctgacggcccacaggtttgagaaccactagtctagtatttttatcactcccggagattctgtttcagagtcaggggcctgatttttagtaaatcttcctgagatgattcagatagaagcaggtttggaaactactgggttagacagtaattcaaagaagggatcagagttttatttttttcctttatgttgtctgtatatttttcacatacaaaagtggaaaagatagcaagatatataaagaaaaggccaatctctcctacctctatcttctaaaagtagccatttattactgtgtagtggcatccttccatccctcttttcttgcttacacaaaataaacacgagagagagagagagagagagagagagagagagagagacagagagagagagagaagtactctttctgtttttattaaaacaatcagacacttattttgtaatttggtagtatttaaaaaaatgttatttcaaataaatgatgatgaaaccaatatctgttctcttgtctatatagatttaaatttagcgatgagtataaaaacattttcatttcatttttaattctttagcaggtataggaacaatttgggaagattcacctaggaaattttttttttttttgcgggggtggggcagggacgaagtctcactctgtagcccaagttagagtgcagtggcacgatctcagctcactgcaacctccacctcccgggttcaagcaattctcctgcctcagcctcctgagtagctggaattacaagcgtgtgccactgcacccggctaatttttatagtagagatggggtttcaccatgttggccaggctggtcttgaacgcccaacctcatcacctaggaaattctaaaactatcagttaatatactaaaggatatgggttcataggtcaaacagcatcttaaaaaccaggaggacagtattaatacaggaaggctaaaaatggcatataaagccttcttttctatacttataataaagtaattaaaagctacaaaaagaaaaccttttatgttacttatgcttagctattactcattttttagataaaagatatttttaatacaaaagcaaaactaaggcacaactgatctccacttacatgctttaacaaaacataaaaggcagcactcaaatgtacaccagaaataaaaattctaaaatagaactactaataaaaggaatgtaaattactggctaagacagaaacatcatattttagaagactaagccatgattttggtgaaatcagtacatcattcgtttgttattattaaattttcataaagcatctccaaaaagctcaatgacacacactaataattgttaaataatgcaaatgaatacttctaaattctccagtactgtaaattagcagacagtgtgggagttgcagagaacaatgagagagagaagtaaaaacaaagcaagcagtaatatgatatcttaaattaagttgcaatttctgatttactccaaaaggatctttctgggcaggcaggatttaaagagttttaagaaatgatgtctttctgcctgtcaggagtgtgttagaagtatatttaattctgtgaagttggaataggaaagagaacatgggggagaactaagttaatctagaagaggtgtgaaattggagaaaggcctaaaaatcaaatgcaaatatgctgaagatagtaataattttaaaaaggaaatagtttaaagaaagggaacaacattcagtgtggtaaagaagtggtattaaaaatagtgttttgtatttttttttggcaggaatggaatggattttatggttagataaatcaagaagacctacaatggcagttaagatttgaaattgctagatatttggcaagagaactgataaaaagagaggggagtaattatcaggtgtcacccacaccctgaaggctgcacccactcttatcctctaattcctttgacccagagtaacacttctccctcttcctgtccagatgtggtttctctactagtgctctaggtcccatcccctcctctttccttaggaacttcattccattgactatcttcagtcaatcctccaattcctgccattagctctttcagcatataaaaatcatcaagtatgccaggcatggtggctcacacctgtaatcccagcactttgggaggccaaggcgggaggattgcctgagcccaggagtttgagaccggcctgggtaacatagtgagacccaactctacatttttttttttttaatttgccaggcatggtagtgtgcacctgtagtcccagctacttgggaggatgaggcaggagaattgcttgagcccaggaggtcgaagctgcagtgaactgtgtctgtgccactgcatttccatcctgggcaatagagcaagaccctgtctcaaaaaaaaaaaaaaaaatcatcaagcgtttcatatctaaaagcaatataaaataaaataaaaagtttctttaatcttatgttctcctttaactattatatctcttcttttcacaagcaacttctaggaagaagtctacttcttccctccttgattcacttcccgctctgaagcagtctggctttaggcgtcaccatctcatggaggctgcttcacttaaaagcaacattgatctccttaacaccttatccaatcttcgggttttagctctcctatgattcgatcttgctgaagctttttacacattcatttcctctttcttgaaatgttctcctccctcagtatctaagatgtcacattcctttctctgttgttgctccacagggacccatctcagtctaatattattctccctctatactgatgacttgaactataccaattaaaagatgactcacaatccagaaatctctagcccagatctctgtggaactccaattctggttatgtctaagaagcatctctttctgaatgtctgatggtacttatataaccaaaatgaattcatcatattccaccttaaaaagtcactattccttaaattgaatggatccaccaacccctcttctctccttcacctagttattcaggtaatctgggacttatctgagatcttccttttctcttacttcccagatctaatcactaaggactagagattctctcaaaactgtcccctaatatcaatttcattgcttttgttcatttctcatttggactatgtcatattgcaacaatccccttaatgatttctctacttccaatctcaattttttgcaattctgtttcaagaggtcagcttgctgtaatttttcaatggctttcagttatccataagcccaactcccaacctccttgtaaggtataaacgctgctgcctactctccagcctcatttctaccactttccaactcaatttcatgctctagcaacactgaacatgctttcttatggctagtccttctgtaaatactgcagcaccattttttccacttgtctatctggtacattcttactcattcttaggtatctgtttaaatgctaacttctctaacagcatcccttttctctcaggtgaactttggtgttccttatatattcctaactgtagttttgaagactcttccattaaacaatgatcttattgcattataattgtttgcatgggcatcttaacttcttaactggcttagattagggaattaaaatagacattggctgggcacagtggctcacacctgtaatcccagcactttgggaggctaaggtgggtggatcacttaagaccaggagttcaaggctgcagtgagctataatggtgccactgcacactagtctaggtgacagagtgagaccctgtctcaaaaaaaaaaaaaaaaaaaaaaaaaagagagagagagattatgaaaacatttactgggagacctaacccattttttgcttcaggaaaccaatcttaaacagtgccaagaaaggcaagccaaagacagtggatgaagacagtggtggtgatgctggaaaagcccaggcaaactgaagcacagctactgtggaagagagaacagcaggaaaaaactggagagacaccaggagcccaactgtgaagggactgctaagagaaggttcagctttgtgcttccagtcactgattcaaactttcttcatgaatccaaccactaaattaaacaccagctttctaaaagctgcacattctcatactataaaagaaaatatatttcaaataaaatactttccaggctttccagaagaaaaaatccatcccatgtcacccactgtgactaagcacggaggaaacagattaaattagggatattttgcccgtacatctccaggctgcatgaaatgaaaacaaatgagagtcaggactctcaaaagtttcacagttctaaccatcaacgcaatgtgccaagcaacatagtaaatgttcacgtttcaaacaggaggaatacattttaccttttctatctgggatagaagattagattctaatcttttttggttttccactcagatgagcaccttaagtgggatcatatttctatattacaggtacttttttttttcctgaaagtctgtgaatacttaattcaaaggccatggacagcaacctagaggagctctgaccatgaaaaatgttttataaatagttccatgtgcactgttcatctggagtctcactagagatggataatgaccttgtattttgtactcatttactctgaattagccaaaccttctgtttttaattacatacttaattcacctagcatggtctaattacataaaacaaaacatcatttaaacaaaaggtggccttgaacttaatctatcaaaacaccagttagtttttaaagtttttagttcttaacaaactgccaagacatgcaatagcaattttccaaatgtgatcatatgcttttatagcaacagatttactacataatcaaacatctgtatatacttttgtctcactattaatgcaaatatgcttaagttttgatagacttaaaaatcttaaagctgaagttcatactacacaataatttttaaatatccatagtcattttggccttgaaatgacaagttatcataaccatggctacttatttacaaaatggtccagaactttgtaaaaactcatgttcagaattttccttaattcttcacagtgtaaattagtagcccttctctgtgttatcatagcaccttatatattttcaatcacagtatttataatgctgaatagttattggtttaaagatctgacccccaactagattgcaaacttcatgaaagcagagtttatgccttttatctctatcttgccaacatggagcacagtgcctagcacagagcaggtcctcaatatatatttgctgaattaatgtattaaaatacaatgttgtaaaactatctcaatttatgaatatgatcttatatgtagaaaatcataaggaattcaccaaaaaattattagaactaataaacaagttccaaaaggttgcaggatacaagatcaatatataaatatcaattgtatttctatgcagcagcaatgagcaaacaaaaatgaaattaagaaaaccaattccatttacaatcaaaaccgttaaaatattttgtaataaatttaacaaaagaaatatacaacctatactctgaaaaccataatcctcaaattgatctacagaatctagagatccaatgcaatccctatggaatcccagctgacttctttgcagaaattgacaagctaaacctaaaattcatatggaaattaaaggaattcaaaatagtaaaagcatataatggaatcctattcggccttaaaaaaggaacaaaatttgtcacactacaatattgatgaaccttgaggatattatgctaagtagaataaaccagtcacaaaagataatactgtattactccatttatatgaggtatctaaaatggttaaattcatagaaacagaaagtataatggtggttgccaggggctgatgggaaaggggagctgttatttagtgggtttaaagtttcagatttgtaagatgaaaaagttctggagatctgtctcataacaatgtgaatatacttactatttaactgtacacttaaaaatgatgaaaatggcaaattttatggttttttttaaccaaaataaaaaaaatttttaaagccaaaacagtcttgaaaaagaacaaagttggtggacacacacttttcaacttcaaaacttactacggagctacagcaatcaagacagtgtggtagtggcatgaagatagacatatagatcagtggaacacaattgagggtccaaaaataaatcttcatatttagagtcaattgattttctagcagggtaccaagataactcaatgagggaaagaataatcttcaacaaatggtgttggaacaactgaatattgacatgcaacagaacaaagttacttctatctaacaccatatacaaatattaactcaaaatagatcaaagacctatatgtaacagctaaaactataagactcttggacgaacatgtaagtgtaaagctttgtgacctggagctacacaataattttcttagctatgataccaaaagcactagtaaaaaaaaagaaaaaaggaaactggactttatcaaaatttaaaaatgtgcttcaaaggacaccatcaagacagtgaaaatacagcccacagaatgggagaaaatagttgcaaataaaatatctgataaggaacttgtatgtagagtatatacagagctcttacaactcaataataaaaagactaataaccaatttaaaaatgagcaaagggtctgaatagacatttctccaaagacaatgtgcaaatggacaataagcacacaaaaagatgctcaacatcatcagctattaggtaaatgcaaatcaaaaccagaacgagataccacttcatactcactaggatgactataatcaagaagatagacaatagcaagtgttgcgaggatgtagagaaattggaaccctcatacactgctgacaggaatgtaaaatggtgcagtcactttgaaaaacaacctgacagttcctcaacagagcatttccatattattcagcaattcttctcctaggtatactcaagaaaaaggaaaacgatgtccacacaaaaacttgtacaaaattgttcacaacagcattattcataatagtgaaaggaataaagtgttatctgcacttcatccttacacggcctcatagtattccatattatgtatgaacacaccacattttgtttatctgttcatcaattgatggatatctgggttgtttctacctttttttttttaaaagctattatgaataatgctgcaaacttttctgtctttaaatcctgacatgaagatctgggctgaggcaggggtagaggggtagagaaaatgcctatcatcaagttcttccctatgtctatggcctagatggggtgggtgtcggatggtgctgaggcaggaagaggagaggagaactctcagtaagttgctaatgagaagagatcccagaagctagttcctgtgttccattctgcagtaacatgtcctctctaccatgagtgatacaataggagaatgggtgaacactcccactgtggtagatcctaagcaaagcatgacatggccctgccctccaagaaattttgtccataagataagtcactatttcatgttactgtaataatttttgtcattatctggagcaaaaaggaggatcttttgcaacaaaagagtttatgaacctaaattgctcttgtcaagatcaccaatgacctccttgttgctaaatatccaatagtaaattataagtcctcatctttcttgggcattaacaaaatctgaaccagctgatccctctttttagaacactttcttctcttggcttccagaatatcacactctactagttattttcctacttcgctgatttgttccttatctgtcccctttgctgattcctcgtcttctccccaatctctcaatgttagagtgccctggggatcagtccttaaaccatgcagtgagctgaataatggtcccttgagataccatgtcctaatccctagaatctctgaatgttacctcatatggcaaagactttgcaaatgtgattaaattaagtctcttatgatcctaagaatggggagataattctgaataacttggatgggccctaaatgcaatcataaatgttcttttaagagggcaggataggaattcaaacagaaaaagacaaccttggaagcagaatcagagggaaaagatgctacactgctggctttgaaaatggagaaaagggctatgaaccaaggaatgcaaggaatacagatctagatactaaaaagggcaagaaactctagattctcccttaacagtctccagagcaagtgtggccctgctgaaaccctgatttagccccataagacttagtttggatttctggtccacataactataaaagaataaatttctgttgttttaagccaccaagtaagtctgtcataatttgttatagcagccataggaaactaatacagattttggagcctggaagtggggtggtacaaaaacaaaaacctaaaactatgaaagtggctttggacttgacagtaggcagaggctagaaggagtgggaggtgcatgatagaaaatactcagattgcctaaaacagatttttggtagaaatttgaacattaaaggcactgctggtaacagctcagaagaaagtgaggagcatggtagagaaatcctaattcatcttggagaacacatatatcatcataagcagaatgttggtagaaatataaacacagtaaagatggtactggtgagggctcagaaggagatgagcaacattttattagaaactgtaggaaaggagatttgtcatatagtggcagaaagcttagctgatgtgtgtcctacaattatatacaatgatgaacttagatttagatgatttggatgagatcttggacttttgagctgattatatttaggtgagattttgggttgaaactgaaatgggttgaggcttctggagatactgggatggggtgaatattttgcatgtgagatagatgtaaatccttggagacaagagggcagactgtggtaagctcctcaagatattcatgccctgatgcctggaacctgaaaatgctacctcatatggcaaagactttgcaagtgtgattaacttaagcatcttgagatatggagattatcttggattatctcagtgggccctcaatacagtcacaagtgtccttagaagaggggaggcagagaggttttacacaaaagaaaaaggtcatgtgaccaaaaaaaaagaaaacaaaaagaaacagataagagagaaaagatgctatatcactggctttgaaaatggaaaaagaaggctggtgtggtggcttttacctgtaatcccagcactttgggaggccgaggcaggtggatcatccgaggtcaggggtttgagaccagcctggccaacttggtgaaaccccatctctactattttttttatactttaagttctagggtacatgtgcacaacgtgcaggtttgttacataggtatacatgtgccatgttggtttgctgctcccattaacttgtcatttacattaggtatttctcctaatgctatctctacccctgccccctaccccatgacaggcccccatgtgtgatgttccccgccctgtgtccaagtgttctcactgttcaattccaacctatggtggtttttgttgccactgcttttggtgctttagtcataacctatgagtgagaacatgtggtgtttgattttccgtccttgtgacagtttgctcagaatgatggtttccagcttcatccatgtccctacaaaggacatgaactcatcccttttttatggctgcatagtattccatggtgtatacgtgccacatctttgtaatccagtctatcagtgatggacgtttgggttggttccaagcttttgctattgtgaatagtgccacaataaacatacgtgtacatgtgtctttatagtagcatgatttataatcctttgggtatatatccagtaatgggatctctgggtcaaatggtatttctagttctagatccttgaggaatcgccacactgtcttccacaatggttgaactagtttacactcccagcaacagtgtaaaagcgttcctatttctctacatcctctccagcatctgttgtttcctgactttttaatgatcgccattctaaccggcatgagatggtatctcattgtggctttgatttgcgtttctctaatgaccagcaatgatgagtattttttcatgtgtctgctggctgcataaatgtcttcttttgagaagtgtctgttcatatcctttgcccactttttgatggttttttttttcttgtcaatttgtttaagttctttgcagattctgggtatcagccctttgtcagatgggtagattgtaaaaattttcttccactctgtagattgcctgttcactctgatagtattttcttttgctgtgcagaagctctttaatttaattagatcccatttgtctattttggtttttgttgccattgcttttggtgttttagtcataaagttcttgcccatgcctatgtcctgaatggtattgcctaggttttcttctagggtttttatggttttaggtctaacatttaagtctttaatccatcttgaattaacttttgtataaggtgtaaggaagggatccagtttcagctttctacatatggctagccagttttcctagcaccatttattaaatagggaatcctttcccgatttcttgttttcatcaggtttgccaaagatcagatggttgtagatgtgtgttgttatttctgaggcctctgttctgttccattggtctatttctctgttttggtactggtaccatgctgtttcagttactgtagccttgtagtatagtttgaagtcaggtagcgtgatgcctccagctttgttctttttgcttaggattgtattgcctatgcaggcttttttttggttccatatgaaccttaaggtagttttttccaattctgtgaagaaaggcattggtagcttgacggcgatggcattgaatctataaattactttgagcagtatggccattttcacaatattgatgcctcctatccatgagcaaggaatgttcttccatttgtttgtgtcctcttttatttcgttgagcagtggtttgtaattctccttgaaaaggtccttcatatcccttgtaagttggattcctaggtattttattctcttagtagcaattgtgaatgggagttcactcatgatttggctctctgtttgtctgttattggtgtataggaatgcttgtgatttttgcacattgattttgtatcctgagattttgctgaagttgcttatcagcttaaggagattttgggctgagacaatggggttttctaaatatacaatcatgtcgtctgcaaacagggacaatttgacttcctcttttcctacttgaataccctttatttctttctcttgcctgattgccctgaccagaacttccaacactatgttgaataggagtggtaagagagggcatccctgtcttgtgcaagttttcaaagggaatgcttccagtttttgcccattcagtatgatattggctgtaggtttgtcataaatagcttattattttgagatacgtcccatcaatacctagtttattgagagtttttagcatgaagcgctgttgaactttgtcaaacgccttttctgcatctattgagataatcatgtggtttttgtcattgattctgtttatatactggattacgtttattgatttgcatatgttgaaccagccttgcatcccagggatgaagctgacttgatcatggtggataagctttttgatgtgttgctggattcggtttcccagtattttattgagaattttcgcattgatgttcataaggaatattggtctaaaattctctttttttgtgtgtctctgccaggctttggtatcaggatgatgctggcctcataaaattagttacggagaattccctctttttctattgattacaatagtttcagaaggaatggtaccagctcttctttgtacctctggtagaattaggctgtgaatctgtctggtcctggactttttttggttggtaggctattaattattgcctcaatttcagagcgtgttattggtctattcagagattcaacttcttcctggttttttggtcttgggagcatgtatgtgtccagtaatttatccatttcttctagattttctagtttgtttgcgtagaggtgtttatagtattctctgatggtagtttgtatttctatgggatcggtggtgatatctcctttatcatttttttactgagtctatttgtttcttctttttcttctttactagtcttgctagcagtctattttattgatcttttcagaaaaaccagcttggggattcactgattttttgaagggttttttgtgtctctatctccttcagttctgctctcatcttagttatttcttgccttctgctagcttttgaatttgtttgctcttgcttctctagttcttttaattgtgatgttagggtgttgattttagatcgttcctgctttctcttgtgggcatttagtgctataaatttccctctacaaactgctttaaatgtgccccagagaatctggtacgttgtgtctttgttctcattggtttcaaagaacatctttatttctgccttcatttcgttatgtacccagtactcattcaggagcaggttgttccgtttctgtgtagttgtgcagttttgagtgagtttcttaatcctgagttctagtctgattgcactgtggtctgagagacagtttgttgtgatttctgttcttttacatttgctgaggaatggtttacttccaactatgtggtcaattttggaataagtgtgatgtggtgctgagaagaatgtatattctgttgatttgggatggagagttctgtagatgtctattaggtctgcttggtgcagagctgagttcaagtcctggatatcctgtcttgttgatctaatattgacagtggggtgctaaagtctcccattattactgtgtgggagtctaagtctctttgtaggtctctaaggacttgctttatgaatctaggtgcccctgcattgggtggtacatacatatttaggatagttagctcttcttgttgaattgatccctttaccattatgtaatggccttctttgtctcttttgatctttgttggtttaaagtctgttttatcagagactaggattgcaacccctgcttttttttgctttccatttgcttggtagatcttcctccatccttttattttgagcctatgtgtgtctctgcatgtgagatgggtctcctgaatacagcacattgatgggtcttgacgctttatccaatttgctagtctgtgtcttttaattggggcatttagcccatttacatttaaggttactattgttacgtgtgaatttgatcctgtcattatgatgttagctggtcattttgcccgttagttgatgcagtttcttcctagcattgacagtctttacaatttggcatgtttttgcagtggctggtaccagttgttcctttccatgtttagtgctttctttaggagctcttgtaaggcaggcctggtggtgacaaaatctctcagcatttgcttgtttgtaatggattttatttctccttcacttatgaagcttagtttggctagataggaaattctgggttgaaaattcatttctttaagaatgttgaatactggcccccactgtctactggcttgtagagtttctgcccagagttccactgttggtctgatgggcttccctttgtgggtaactcgatctttctctctggctgccctgaatattttttccttcatttcaaccttggtgaatctgacaattatgtgtcttggggttgctcctcttgaggaatatctttgtggtgttctctatatttcctgaatttgaatgttggtccaccttgctaggttggggaagttctcctggataatatcctgaaaagtgttttccaatttggttccattctccccatcactttcaggcacaccaatcaaatgtagatttggtcttttcacatagtcccatgtttcttggaggttttgttcatttatttttactcttttttctctaaccttgtcctctcactttatttcattaatttgatcttcagtcactgataccctttcttccacttgatcgaataggctattgaagcttgtgcatgtgtcacgtagttctcctgccatggttttcagttccatcaggtcatttaaggtcttctctacatgtttattctagttagccattagtctaatcttttttcaacgcttttagcttccttgcaatgggttcgaacatcctcctttagctcagagaagtttgttattaccaaccttctgaagcctacttctgtcagctcatcaaagtcattctctgtccagttttgttccattgctggtgaggagctgccatccttttggggagaagaggtgctcttgtttttaggattttcagctttctgctctggtttctccttatctttgtggtttttatctaccttttgtctttgatgctggtgacctaccgatggggttttggtgtagatgacctttatgttgatgttgatgctattcctttctgtttgttagttttccttctaagaatcaggtccctcagctgcaggtctgttggagtctgctggaggaccactccagactctgtttgcctgggtatcaccagtggaggctgcagaacagcaaatattgctgcctgatccttcctctagaagcttcatcccagaggggcatctggctgtgtgaggtgtcagttggcccctactgggaggtgtctcccagttaggctacacaggggtcagggacccacttgaggaggcagtctgtctgttctcagagctcgaacaccatgctgggagaaccactactctcttcagagctgtcagacaaggacgtttaagtctgcagaagtttctgctgccttttgttcagctatgccctgcccccagaggtggggtctatagagtcagcaggccttgcagagctgcagtgggctccacccagtttgagcttcccaggctgctttgtttacctactcaagcctcagcaatggcggatgcccctccccctgccaggttgctgccttgcaggttgatctcagactgctgcactagcagtgagcaaggctccgtgggcatgagacccgccaagccaggcatgggatataatctcctggtgtgccttctgctaagaccactggaaaatcacagtatttaggtggaggcatcccgtttttccaggtacagtctgtcacggcttcccttggctaggaaagggaaatcccctgaccccttgtgcttcctgggtgaggtgatgccctgccctgcttcagcttgccctccgtgggctgcacccactgtccaaccagtcccagtgagatgaaccaggtacctcaattggaaatgcagaaatcaccgtcttctgcgtcaatcacactgggagctgcagaccggagctgttcctatttggccatcttggaatggaatccatgtctctactaataataaaattagccaggtgaagtggcagatgcccataatcccagctacttgggaggctgaggcaagagaactgcttgaacccaggaggcagaggttgcagtgagctgagattgcaccacactgcactccagcctaggcgacagagcaagactccatcaaaagaaaaaaaaaagaaagaaaatggagaaagaaccaaagactcaacgaatgcagctccagatactgaaaagtaaaagagattctctgctagagtatttggagggattgtagccctgctgatagcatgatttagcctcataacacttagttcaaatttccccagagaaggtgtggccctgctacaactcaggtttagccccgttaagatttagtttggattcctggctccagaactgtaaaacaacacatttctactgttttaagccactcaatttgtggtaatttgttacagcagccatgggaaatgaatacagaccccttcccttctctacatatactcatttctttgttacagcagccatgggaaatgaatacagaccccttttcttctctatatatactcatttctttggagagtcctttgaagatcccattcagtctcatggttttaaataccatctatatactgattaccacaaattccagcctagaactctcccttgaactcccaatttggacacacaatcgtatatttggtatgcccacctggatgcagaagaacttcccagccaacaagttccacccacagtcttccccagttcagttataggcaacaccatcctggctgttcaaacaaaaaaccttggaattatcccggatctttcattctcatattcagtcagttatacaattttgttgcctatatattaaaaagttatcaggaacctgaccagttcttactgtctctggtgctctttgcccggatgactgcttctacccttgccccactcaatcaattctgaaatgtggtcagagtaaactttttaaagtcagtcagttagagatcaagttatttctctatggctacatatttcttttagaacaaatgcccaaatctttacaataccttcagaagcctaccatctggtgcaccctaccacttccctatcctgctctccaacttcatcttcttatgttctggccctcactcattcagctgcccaaaatcaatgtatcactttagtgttcccccaacacaccaaaggaagcttccacttcagagtctttgctggtccctctacttggaatgttcttccttcagatatccggatggctcactccctgcttggtcctttacctccttcaagtctttattcaattgtcactttctcaatgaagccttctccaaccattctactcaatattgcaagccctttaccccaacaccggcctcattaccttacgtggttcttttttctctccaaagtacttatcgtcttttagcaaactgtatactttactaatttattatggttattgactgttttctccattacagtatatgctttgtgaaggtagagatttttgtctggtttatttgttgctatatcatgaatatctagaacagtgccaggcatgtattacatataactgatttctagtatataggaagtagactgcactaccctagtatttaaggtcctgatgaatccattacaaatattttatttcagacttcaagtttttatctatactgcttcaggaaacactttatgttaactattatcataggtggcaaattcctaagttacagcaatattacagtcaccctgctgtaataatcacctatctactagaaaggtagaaggaatagttgtggctcatattgtatgattctacttacacaaaatgtcaagacaggcaaatccacagagacaagaagtagaccagtggctgcctaggactagaaaaagaaaagggtgttgggaggaaatgggaagtgactactagtgggtacagggtttctttttgggataatgatgaaaatattctgaaatggattatagtgccagctacaaaactgtatatgtactaaacaaccattgaattacatactttaaatgggtgagttatatggtgtgtgaattatatctcaataaagtttttattaaaaatttttatgtggctgtggctggttatgttttggattgcttaagaaataaaacaattttggggaaaattatgggaaaacaaatttaaaataaagttcttaacaatttaggactaacaattactatcacaatttgacagtaattaattaaagtaagcaaaattattaggattctaaaaactttcaaataaatattttaactgcatagccttgttctatttaatgacacaaaagatttaggaaaggtcaaggtaagaactaatgatgtattcttacataccttataaattgagtaaacaaaaactcagggaaactcatctaaaaaaataaaaaggttttcaaaactcgacccacatttgcccaatcaggtactaactagtctttccccaaccatctttttttttcatctgaaaagtttaatgatctaacctgctagagattcagcatatgatgaaagggagcttgcagaaggcaaaataattatacgaacaaaatatctttccttttcttaacttggacaaaatatatttagacagaattaaatggcagtttcttgggtggttctttaaagttttcctaggcactcttaagattggtataacaatataaattttattatatctttaagcatctcagaaattacacttataatttatgctcataattataaatagatgtgtctatgtaaaatgtacagtgtactcatttaaaaatctagattcacagcattaaaatacttaggctgttttatataaactacaaacaaaaatacaagttttacttagatgactattgtgcagattattaagagactggtaagtttaatgaaaacatcctaatggaattattttattaaggagaattactttgacatttaaatttttacttgaaagaatcctacctagtaatcgaatagctttttaagaacagtgtataaaataaactataccataaacttaagcctagagttcatcacagattaaaacttttaaactttaaactaatcataaattaaagtatacactgaggaataagacatatacagaaagagaagtactatggccaacagctttttaacaagactgtaaataaaccttattttaccaatattaaaggattcacctaccatattctattaaaaattctatttttctactcataagttacctcaataacaaagatgtgaaaatctaatacttttctaaaacttactaacattttatttaaagtataatatctaatgcttattgacatttattcaaatcacttctttttaaataaaaacaagttctctattttgaaattttgtaggactcaatatcaggtattttgttaaatggtaacttagaataaattcaaaagaaaggtttaaaaaagaaaagttctaagcttttaaatgatcctatcaatattggtgtccgggttacacacaactataaatcaaagcagaaactggcaaaataaaagaatgatgttgacatacattattctaatacgtaatggatttctgtaaagaagaattactagagacaatagatgccccttttgttatgctgctattaagtattattgaacagtcacatttagtttaatgcctaatccagaggcatgccacaaatatgcaagtcctatttttgtctatgtctgaagacggttatgtgtgttctttttctccttccaatttcctaatcagttttgcaaatagttacaaaatttttaccaggccaaacagccccctgctccctaccctcacccatatatttgccttcattttcagcccctgtaacatcagagggtttttttttaaaactgtaaataaatcctgactaattatgatttattcacagctgctctcaatgatattatgaactagtatccttttccactattaataatttctataaaatatttaaatgcagtttttttttacaactagaattctcatttgaacaaacaagaaaatgtcatactgaaggtaaatacatcaatttaaaaatttctcttataaataagtatgttttaagtttaataaagtagctagcacagctgggaacaggaaaaatgctgtttgcttcaattttgcaagcatttgatttgattggatggcaaaatcagcttgactgtgttagaccttaaagcctaacggtgacataaaataggtaaaataggataccctgtgagtaaggtgggtgaagtaattgataatacagagatattttgcaagtggctcccttgactgcattactttctaaagggaggtgaaaggcacatagaagtcactgaaaatacttttgttgaacaaacgaacattaaaaactaaaaaggagttttgttagtgtgttattctagaaaaaaatataaaattagaacattaaatattaatttatacttaaaccaagtaatcctaaatcggtctcaaaaaatatgaataataacatattctaacctcaatgtgtataccttattaatattttctcatgttctggaaaattaattaaaacaaaagtggttcttattaaataaatgaataaaatctattgagacaaatgcttattcatattttttgaatttgaatcacttcaaatggaatatctaataattcagtatttacatatcccataactttaaaaatataacaatgtaagatactgaatcttaaacatacaagtagctactacatgttttgcacacctataatttgcatctattaaggattaaaaatattaaatttctttttattctaaaattcaaaaaaagactatattttaaatatagtcatacctaagtattttagaacattttcgcttaaaggagagctaattgatgctaccctaaatacaagaagctaaatatattaagtacatcaatatgaaatggagtatgaactggtatgtttcctgaatgccttctcttacattgttactaattcattttataatttaccatgaattaaaataatagtttcctaaaaatgactcatggaaatatatgggtgtataaataccatccactttctcctggaaatgtattatcaatctgaacacagaacacagaacctgaagagagaagctcaagtgttttaaaaatatttcgcctctcctcagcagctgatttttccatgcttgttttaaatattaatataaaacaggttttccttaaattacaaaataaaggtaactttaaagaaatattcatttaagttagaggttatgtattaaattgttgccagtgatactgttttaatgttttagttacgaaacagaaactgaagtgaaaaaaatcccacttgcataattttttttttaaattttttaattattattacactttaagttttagggtacatgtgcacaatgtgcaggtttgttacatatgtatacatgtgtcatgttggtgtgctgcacccattaactcgtcatttaacattaggtatatctcctaatgctatccctccctcctccccccaccacacaacaggctccggattgtgatgttccccctcctgtgtccatgtgttctcattgttcaattcccacctatgagtgagaacattgcataatgttttaaaacaacctttagcttgtaatctagatgtaatttgtttttaactttcagaacaataaaacaataaatagagactatagtaattgattggtctgaattgttctaagttccttagtatgaattctgtttcacagttaagccttagactcaacttgtttaaggcaaatagacaaagtataaaatattactttggagatacaagataagtataatttttgaagaagtctcagtttagaattttagatgacataaagaattaatacataaacaatatgtgccacatgtgagcagtatgcacttaataaaatatttgtatgaagctaaaaatttcttaccaaaaagttagtaaaaatagacattattattattccttccttgaaaaaacctaaaactaaatctttaagtaaatgatctataagaattcttagtctggtccatgtgattacatggtcctatgtacccagggccactggaaattctgtaagcttagatagcatgaattctgaatgttagacattgctgttcaataaaaaataacttgtattaaaatttcgtattttcactttcatggttttatttccaagtctggttattttcactacaacctgattttccagatcagtggtgtctggtcaatttatctatgggtaaaataattaagtgttcatatgtctatacccaaatgctcctccagagcagcaatttgcttaagttggcagtgcctaccgcttggcatgcaacaaggctgtcacaaaaaaatgtttactgaataaatgatgaatgaaggaaaaaataaactaaaatatttctgtagagaaagaaacatgaaatgctctaaaatgtcagtcatgtcagtaatgtttatttttacagaagaatgctgactgaaagtgtttaactgtcccctgaattgtgagactaaggctcacaacaaagacaaaaataatgtacaagcaccacctatcttgaagacagccaccaaccaaatggggccaaatcgccaaccttgagtttactcagaggttgaatgagccccaccactcccaaatcatcacccagcctacataagagggcaagggtacatcaggagcactggggtgcagtttttgtcataggagcttcctcactcaagccaagttgcacagcaccaagatattacatcaaagacacgttgtggtttcctgcaagaagaggagactggcatctcactttccagctggactgaatactgaataaagaacctgcaaacttgccctggtgctgccagtggagtagaatttagcctgctgaagtgttcatagatgacctggcatatgtccctagaagttggggaaaatatattggcctagaaacttgtctacttcttatctagagatttctgaagatgggaggcttgggtagagcagcctgcagcagcagacctaatagggccacagaaatagtatacctgggtggggcgggggagaagtggagagtacctctcacatttcccctatctacccactaattctctgagaccctagaaaaagaacaccactgactcccatggctcatatgagagaaccaggactggggaagaagcaagggctgctggtcaaacacatcaatgccccatctagagagaggggaggagtttgaacttatgaaacagaaaggagatatagctacccatctctgaggaagagctcagtgataaaggaagccaagataaagctatcatcccaagaaaaccacatattccaaccacatgaacatcatattgtcagagacattttgcagcacttagaaccagattatgccagagtgagacccactatcttcagataaccacgttcactcagatgatgacctctgcctctcttgtccttcctccatgctgcctccttcccctctctctccaagaattagacctaggaggggagaaagcatgccaacagtcttaggccacttaggtggtcttctctaagatgtagggtggggaaggatcaagtgagacttaaatcaaatttgagattaaaatcttaaactacccagacttttactaaatgaaagtgaccaaaaagttgtagcatttgtccaaaggcatagttaagagtcagaaaagggagattagaaagagcatgcttcaaagtatgttttttaaaaaaagtaatttcagatatattgccaatgagttgtaactgtttaaaagttatttacaccctgtggtaggatgaatgctcaaaaaactgctaacaaaaaacttgatagctaaaactattctttaagttcaagcatagactgatacctgcccccacactccccctacctccccacaaaaaaaaaaaacagtgaaatcctactcatggtaaattctcaggtgacagctgtaatcggcctacatttaagcttggttcaatatatccatgggtagatagagccagcctctgctcactgttcctgccccactcaccttacatttgggataccctagaaatccatttttggtaatcatctctcttcaagggtctctctggttgatctcatatacttttttccatgccaaatagtcccaaattcatggttccattctgtactttcaactatctaatagatttatatgtcctccagacactgaaaactctatacatccataacatatcttgttagcttatcctccacacacacccagtctctaaaatctgttcttccctttttctattctttatctcaaacaatagcaaaaccatcaatctaattatctaaatcagaaaccttcttcttcaccctaatcctctatataaaactgatgatcagatccagatgattctaaatgatctaatctagatgatttcttgaatgtagactctcttctctaattccactatctttgccttaatccacttttaacaatttcaacagtctttaatccagttatcctaggtctccagggtctccagttcctctctatgcttcactttgacaccaaaaaacaagtttgataagagttttcccctcataaaaattttttattagctatccattactcataggattacggctaaacctagaagcctcagcttggcagttaaagcctttaccacctaggttactactgcatcatatccaatactagtctgttcagcagacatggttgcctttaggacctgttctctgacccagctgaaatgtgcaaaaaagcattctgtgttgctggctaagccaactcagtctgcaccccgcacctcggcctgctccatgtctgtattcctactttattcgaatgggcttcagttttgctactacccagagtttggattcagtgctatgatttatgcatctcctctttctcttgactgatggctttacttctggctcaggctaacctcttcactaaaggcttagtgatagtatcattgttaaatagtacaaagtaaactcttaagtcagatttcctgggttcaaatttttgctctaccacctacaagctatgagattttgaccactgaacttaatctctccaggcattagtttcttcagtttttttttttattcttgcagcttttatgaaagttttcttttttaaaattttattattattatactttaagttttagggtacatgtgcacaatgtgcaggtttgttacatatgtatacatgtgccatgtttaaaggataataatagtaccttctgtaaaggatctcctgcattgtcaggaaagtgctttaaaaagtactcactacatactaagatctcaatatgtgtcagctgctgtttttcccaatacttattagtttattagccaaaacaaaaggacaggacaccctctgagccataaaattatatatgtagataaacttcacacaccattttcaatataaagactggctacttagaaaaacaatttcagatgctgaagtttccaacttaaaacagcctcctatcatgagtcatagcaaaatgtggcatagttgcccaaattaatagaagcctaatagtttaaatatggcgtcaagaggaaaaaaaagtataaatgaccatagacaaggaagaaattcttacaggtgagagtaactgatatacaatatggaaagacaccacaggttgactaattctggaaaattctttaaaaaatgacaacaaaaaagatgaatttccacatatcgaaagagctgctactaaatgatgactactagacacccaagggttacagatacttaataatcttcttcagttatttgaagaatattttttctagaagaatatacctctaattttataataaaagatggaagatagaatttatttgcagacttgagctataattcactgttccacaaagcaaggggaaattatctgcactttatttctattgtgccttatacagatatgctaaggggaaagtattttaatgttcataatcaaaacaaaaatgattaaatggtcaaaaccaaaagcaacgcaatttcaggaattctgtactatcactgaagttctaatgaattagtatatttcttttcatcaaagaatataggcattaaaatgacaattttagatctttcattagcaaagataatccagaactcgctagtcgttccactggactagttagtacaagaatatggccgataattaactttttatatatttatatatttgtagccttggctattaggtagtttcatttgcattctcaaattaagatagagagttaaaaactaaactgaaggtctgtgagaatgaaacttgatactctaacccaggttactgagccttttataagatgccttaataattaataatactatactgcatatcaaatttcaacatgcaccattactgaattcatgaagaaaaaaaggtctgttgagaaccatgtaaatgtgtcttcaaaataaatcagtaaggtatcttttttccaaaatactttcatctgctatgagaaacaacattagtttgaatgcccctatcactcatttatctccttaaggtctgtctatcgttctggaaaggtgtttcaacaactgatgaacacaattacaaaacaagactactttggttttgaatcaagacaactagattctggatttttaaaaaaagtctattatttactgaaaagtcttccaacatgaagaaaccaacctaatgagggctttctatttttatgaatgagaggtactatggaaaaggctaccaacctaatggcaggaaggaggaaaaggtgtcagcattaattcaagtaggccaacaaatatgataggcccccaaacaatgatgtgcatacttctaactgtggaagatagacatgagaagtatgatggaagtcagttatagaaagatttctgatagtgaactactatgcatactcagaaaacctgaattaagtataaaattacaaaaataattttagatttaaagaaatttcatgacagttcaagtacaaaactattccatcatcaaaacacaacctgatatatgcattactagtttcctcaatcaatttttaaaacttttttgaaatcgaatgctttatttatttcaaaaggtaaacactgttgggctatcagtcttaaattagaagatcataaattacattgtccactctttgatcctaaattccactattggttaacatctcttttgatgtaatcaccccaatagtccccagtgcttactgactaaacatccaaaattgggttatgaatagaaagcccacatagtcaaaataacttccttagacatcaacattagccacaacatatgcttggagtacaatatcttgttttaaaatgtagagtagtcaatttttcaatgtaatcttctaaataaatgacattttaaaaagagcaaactactatgaggagagtttgtgcttcttggagctctttttgtaagtcatttttcttttgccatgtgctttaaacatcttaataaattataacatgttgacaagaaaccacatactgcacctgtgctttctatcttaattaatccaataagtacaggcctgctcacttaaatttgtaagggaaatgatgatataatgagttttaacttaaggtattaattacctaaataagcagaattagcttaatgtttcagtagactttgcctagacacaaccaccaaataaaaatttcagaaattatggaagccttaaacagcaccattaggaataagaaagtgaaacgctcattctacctcagatagccaagtggattaaattctactaaagaaaaaaattttaaaaaccagtgcagcagttcagagacactaaaatctttgttgcttttaccgaagaatcaattaaatctagtttagctgcccagtgactaaattattattttctacttgtacataaacacttttctttgaagcaggtcactttcctttcaaaacaaaggttatgactatcttaaatgcctcagcagacggatggtcaaaacctcataaaaattctacatggacctagacaatcacatgacacaactgtgcacacgccacaccatctgttggatatgactgccagcacagatttcgtgagctggcaaaggactgaaatagtcaagaattctgcaactatttcaaagtgcaggcttctcattaattttaatttcctgttggctctacaaggaatgactgagtagtgaaagcacaatatgccacatacacttgagttcatgccacatgtacacctgtaatcataaactcttatccaaagctatccactggaacatttgggattttgtgtgtttatttcttctttaccctagaagaaataaatctgaaatatctatagttgtcttttcatactttgttaatactcttgcaaacatctggaaatacttgacaataatcatttaattaatgcaaaggtaatcgatgacaatatgcttaaatacttcactcaactgaagtggtttcctcagtccacagaactaaggactgtagagaacaagcagttctttgactaaggagtacactacaaggaaaactatagccaatatctcttttaaaaccagaaacattacctgcatttaaacaaagcagataacatgctgctatactggtaaaacaaacaaacaaacaaacaaacaaaaaactggtagatgctgctggcttaagtttttaccttaagctgtctacagggtctgtgttgctgagggcttactaaaggggtggccctgctcctctttttcggggctactctagtttctttatcactccttcacagttgctggctatagaggagggtgaaaagaccctgagaaagaaacatttctccagaacaagtgaagattcctaaaatgtccatgggcagctccagcagcagggttggtactttctctgccaaccctttactgttttctgcattttgcaacagtgacttttgttttgtttccctgtaatcatactcacttgctaatgcaggcaacaaaggtaggactgcggaaaaactaggaaagccccaggcaactttatacttggggagcaaagttagtttttttcccttctctgccacaatttttgggactttttcttcagtgtggccctggaggattcttgtgtcccttagctcaaaagaacaccaccaactgaataaatatttaagaatcagagtaattaagaaatgttaacttactattcagtatgagtcacaaccaaaaatggttgatttacctaatttctcttatactagtaattactgtcaatccaatttctttcttttttaaaatttggaaccaatgtagtgggttaacagatggcttttgaagtttttgttcttattccaaaatctttacattacccaaaatatatctatttaaatatgatactgtaatttctgcaaaacattatctacatgctctctatttaacactaaacaatctggatgttaaggctgtttggaaataattctaacaaaaactgaaacattagactagtgctataataaacagacttgccttttacatttgttttagaaatcttcataagcacatcctaaacataacttttttccggtagggttaaaaataattcaattagcccaaatatattttatctcctatctttttatgataatccccaatttggtgacatcataaattcttttatcatctccttacattcaggaacataacataagaaaatccatagaaaatcccaaagacaaatgctaacgatttaaaaggaagtacacaaattctattgcatacaggctttaagacaaggaatgcttcctaccctgcacatctgtctagcaggtgcctttccgaataagttttgtcctttaggaatctgctctgagtacctcaaaagacaataaagtgttctctttcatttttttttcttagaacccattttcctcaaggcagaaggatgaagccttctctgtcctgaaaatatggtcaaaacaactttggcttattttaagcaacttctatcaaatagacttaggaattatataaaatacagttctcttctagaaggcggcctcgagatgcatcatgaagagggaagataaacacataaaccttagtatgctttatactttaatgagtcatattttttaacattctgtaactaatagatgagggaatgaataagaccagatttccctcattaacagctggtatctttgcttttagtccacttccccattttgtgagcaaagcagtccaccaaatcacttacgctgtgctccacctatgcttcttcttttaaccattctctctttgcccctcttacacccttttccttgtcttttgccatactcactactactcttggcaattatttgttcatcttctggcaatgcttcctttattcatctcttatttatttccatttccattccgctcagtggcgattacaaacattttccactttcctcaaagtgatgagagggttgagcagttccagttgacaggtgtaataaatgttgagaaaggaagaactgttctagtcactccgtccctcctgcaattccctttttaaggctatctgccctatataagtcaaaaataaataactctgcaaaaattggatccagtcatatgatctcttgatatccctttccaactgtgagaacatcttcctttattatttttttttggtactgtcaccatttatcatttggttcctcaccttaactaatcaaaatagtactcttcaatctagtatttcagctatttctgttaatctttcctcctcattcttgtttttcttttcaattttattcctatattattttaagcttgtgccacataaccgatttcccctaccctgagtctcttcctatcaatccttcatgctatcttcaatattaatattcttaagatacttttcatcatgtcatcctccaacttaaaaccttcagtggctttccactgtctattaaataaatattcagactctgtaaccttgcaagctttcaccctctgatctggatctacttttccattttatctctcgtatttttccagattaactaccacagacttgaaggtctctatttcattgccacccaacacagattatgctttcctactgctaagctttttattacacatcattccttgtagttcctgccttctctctttctgctatccatttatcaatgcttagacaaagtcctcttccacattataatttcatatacaactccagccttcatcaaatctccctcttattcaaaaccacatggcaatgtctgagttattgttctggattacaatttaccacttcattaactcataccttgtcctcttaataaatcagtataatttatttttacccacagtgcctagcacaatccaaagtaaaatatttgttaaattagcttaatgttttctaacaaattttggaatttccagatagaatgactacaaaatctatgaggggctaaaaatgtttccaaaagttactttcaggagttagccattggaaaaatagattcacaaaactaaaatgagtctaagacagacagtagaaggctacatgtcaaaaattgtgtgtatgtgaaaaatctgaaagtagagtactgcaatggtcattatcaaaatcattaatgaactctgatttcctaaattcaacattctaatttctgttgaattttaattaacaccctttctattagattgtctgcaaagtatactgtaataattccttccatctcatagcaccctttgccatgtaactttgctgttccttccatcatgaggtgaaatttatttccatatcttatgaattaggactagacttctgacatattttgacaacagactatgacaacagtgacactgtgcaaattctttcccctcttctcttatgcattttttatgcaaaaaaatgcataacacaaaattaaccattttcaagtgttcagttaagtggcattatttacattcacactctcatacaagcatcactaccatccacttctggaacgtttttcatcttgcaaaacggaaactctgtacccatcaaacaataactccctatttctcacccgtgagaaccaacattttattttccatctcgatgaatttgactattataggtaactcatataagtagaatcatatagcatttgtccttttgtgacctggcttatttcacttagcataatgtcttcagtgcttatccatgttgtagcatattgcacaatttctttcctaaggctgaacaatattccattttatgtattacaacatttttttaatccattcatccatcaatggacacttgggttgcttctacctttttgtcattgtgaataatgctgccatgaaaaagggtgtacaactacctctttgagaccctgctttcacttctttggtacatacccagaggtagaattgctggattatatgataatgctatgttagtttttttgaggaaccaccatactgcttcccatagtgactacaacatacttccaccagcaggtgcacaaggaaaggttccaatttctctacgtcttcagaaacacttgttattttatgtgtttgtgttttgataatagtcatttgaatgggtgtgtagtatcttattgtagttttgatatgcatttctctaatgattaatgataattattgaatcttttcatgtgtttattagccatgcttatcttctttggaggaatatctatttaagtcctttgccctttttttttttttttttgagacagagtctcgctctgtcacccaggctggagtgcaatggcacgatctcggctcactgcaacctccatctcctgggttcaagtgattctcctgcctcagcctcccaagtagctggaattacaagcatgcaccaccacaccccagctaattttgtatttttagtacaggtggggtttcgccttgttggtcaggctggtctcaaactcctgacctcaggtgatccacccgcctcagcctcccaaagtgctgggattacaggcatgagccaccatgcccagcccctttgcccatttctgaaatggactgtttgggttttttttttgttgctgttgagttgtaggagttcattatacattatgaatattaacctcttatcagatatatgatttacaaatgttttctctcattccattggttgccctccactctgttgatagtgtcttgtgatgcacacaagttttccattttgatgtagtccaatttatctattttttgttacttgtttttagtgtcatagcctagaaatcactgctaaatccaatgtcacgaagtttttctcatatgtatttcctactaattttttagttttatttcttactgtaagatctttggcccattttgaattaatttttgtatatggtgtaaagtaagactccaacttcattcttttgcatgtggatatccagttttcccagcacgatttgctgaaatgcctcttctttgcccccactgaatggtcttggcatccttgccgaaaatcatttgaccatagatgtgaaaagtttacttctcagctctctattccattggtctacatgtctgtctttctgacagtaccacactgttttgatttcagtagcttggtagtaagttttgaaatcaggaaacatgagatcttcaattttgtttttctttttcaagattgttttgactaattagggtcccttgagaatccatatgaattttaggatgagtttttttctagttttgtaaaaaatatcattaggattttgacagagatgacaatgactctgtagattgctttaggcaatattaacatcctaacaatattaaagcttataatctatgaatatgtcttttcatgtattgatatctaatttctttcacccatatttttgcagttttcagtgtacaagtcttttacctacttggttaagattattcctaagtatctcattctttttgatgctattatcaatggacactgtgcagatcctacgctgatgtcaagaggccttacaaccttgttttcaccttcttggaaggctactactgccacatacaaactccaggcttgcctgatgagatcatatgacctagccaatagttagcacaattgccaacacatttgggaagtaattttagagagagtgttcagccccattcaagtcagcagatgactgcagtcacttaagaaaccccaggtaagcccagcagaagaaacacttagataaacctagacaaactattaacctacaaaattgtggttttgatgaaagtaaaatagttgttattttaagccattaaattttggggtggtagaaagattaactgaagcaaagttaaatcattttatttgccatttcttaaccatgataatttattcattactttgtagctcatttcaaagtgtttctcagagcccattaagatgtattccatactactcagccataaaaaagaataaaatcttatcttttgaagcaacatggatggaactggtagctattatcttaagtgaaacaactcagaaacagcaaagtcaaatactgcatgttctcacgtataagtaggagctaaacaatgtgtacacacggacacagagtgcggaataatagactatggaaacttggaagggtgagaggggaagaagggagtcagggatgagaaattacctaaagggtacaatgcacattatttgggtaatggttatactaaaagtccagacttcaccatgatgcaatatatccatgtaaatttaaaaaacagcaatcgtacccttaaatttatgccaaaaaaaaaaaaaagatttattccaactgacacaagacaactctttgaggctaaatactctacattattcattatattcatgaataatttaaagcttaaatgtcagcattctaaataatttataattttaaaaaagtagataggttaaaatgaaatcttattaggactaaagatgtattgattttatttttctaactgcttactacaatattgaaaaaatattaagtagacattgcaatgatgtttgcaagctaacctgtgaattatactgctaatatttgctagcaattagtactaaatttattggggatagattttgaaactttattatctgattatttaaaaactcaatcacaatattgaggaaaaaagtacttaaaatatttataattgcaaagcatttagagtcatgttgtctaagcaaaatggtttattattacttaaaaattcttaaatttaaaaaatgtacatatttatatttatctaaaattgtatttacttatccatacgtttattaataaataaaactataaaggattataaagttattttgtttgggaaaaaaaatcttccagaacaatatgcaaaagtaacattattatttaaaatgtggttaagtaaaaatttactccataaaattttcactccattaaataactcattttgagaatttactctctcaagttctggaaacagttactttaaaatagttcatctgtattttatgtattctttaaaagaagtaagaagaaccagggtagaagaaataatgagaaaatgtaacaaaataggtgataaggcagttttatactgaagtttatatgctcctaggtacagaataggactattatttctgagaaaccaagtggaattaacacttactcaaatagaaaccaactcatatactttaaaaattgaagcaaattctcaaactctatgtcataaatacctttgcttcattaattttggcaactgagtttactgaatgtcagaagtatctcatatttgcattattgaaaacatcttttaaaatagttgtcattttagttttaaggagtcctgaatatttatttaaatttgagctatgatttatttaactataaaaaagtatttctctgcaagtacatttctataagcaagctacagtttcacaatttctctaaccatgtatatggctgtataatgaatattaacatatggtctataattgtatatacatacacacagttcatatacatatgaactatgcttctcaatttgatgataaaatatagaaggagaaaacataaattgaagaattaaaatgtacttacaaagtcaaagtctccatcttgaggaactttccagttatcaggaaaaacgtttttggacatagggaagggttcatgcatgttctgattacagttttcgtgactcttattcttgaagtcttgcttatcaaagtagtccatgaaagatggtctttgtacttgtggtgaggttgcatttccttaggtaaacaaagaacataaggaaggtataagttcttacatttaaggaagtattttctttgaagtatgatttttttatgaagccatataataaatttgcactggtcagattcaaggccaacataattaatttcataaagaacaaagtgaaataaaataagaattaaaaaatacccagaccaaataaaaattaagctgatgattaggcaaaggtctggaatgtttagattgtagaaacatttcagaagtttagtaaaatcattatcagaattttattaaaaatcatttcagctttatttcaaatttctcaaagaaagtaaattttaaaaactcaggtgtttttggtgggctttttttctttgcatttaagcctgcattgctattgttattgtacattttcagctgtaagaaattatgaggacttggctaggcatggtggcctgtaacctcagaactttgggaggctaaggtggaagggatgcttgagcccaggagttcaagaccagcctaagcaacatagtgaaactctgtctctataaaaaatacaaaaaattagccaggtgtggtggcacctatctgtagtcccagctactttggggacagaggcgggaggatcacttgagcctgggaggtcaaggctgcagtgagctatgattgtgccactgcactccagcctgggcaacagagcaagaccctgttcaaattaaaaaatatatatatatgaaatacataaactttaaaaaaattaaaaaaaatcataagaacttactcagtttcctcttatatttatcaaactgcttcctcagtctttctgattccctctgtccctggacttccatggcttcgcctgccacacttacatccatgtctcccaacactacttctctagcccagactttgcgcctaagttccataactaactttgctagctattagacaacttaatctgaggtgagttgccaattaatttaccagttctaaaactaaattcaagatctttcccttcaaacctacagctcccccgacatattctatctccactaaagtcaaccttatttactcaatccccaaaataataaagttgagaattaattcagactcctcccttcccaccatagcaaactgattattaggtcttttaattctacttctcagtacagttaactataaccccttttctctacttatcattgcaactgtcttagtttagcttctaatcacttcttgcttaggccattgtagcagcctccaaactagtctccttgcttccaatatcacagttttgattttaatttccatattgtcaaagtggtgacctttctaaatacaaaccaaaagatgtcattctgctcagaatctttcaatggctcttcattttttatactgaatgactaaataggaaataaatatttggaataactagatttttaatctggctatattggtcttgatcagtggttttcaaattggatccttaaagccccagggctccaaataaatgtcccagagaccaccaagaaggcatttcccatataattctccaaatagaaagtaagctactttcctttttcttttctttttttttgagatggagtttcgctcttgttgtgcaggctggagtgcaatggcacgaactcagctcattgcaacctccgcctcctgagttcaagcaattctcctgcctcagcctcccaagtagctgggattacaggcatgcgccaccatgcccggctaattttgtatttttagtagagatggggtttctccatgttggtcaggcagtaagctactttcttaagaattttttgtggggagtacacctccccacaagggaccctgatgggcaactgtaagttacaaaaagtatttttaaaacgtaaaattgaaatctttccttccgtaatttacactcatgttccaaataaattactctttcgtataattgtccctcaaatatctgaagacagaggtaatggctcctgtcttggctgtctatttttaatataaaacatccccagttcctttcataggatatatgtttcagattcatcatcaacttgtttacttgcctatggagacattctagtctactgttcctctaaaaagaaacataatattcataacagttatctgaccaacctagattgcatttgtaatagtcctagcacagttgaaaactacagttactactatgacaactaagtaacaatgttagttgggacgagctttaaggtcattttggtcaaaagaaagcatgttaagacttatttttagtctttaaaaatatgagggaagcctaaatcgatgcctactttatgtggcaaatcagagagtccggaattcttaatcaaacttcaaaaaacaaaagggggggggacggagattgaactgacaggtaaacgtcctatctcctctttcctttctccctacttttggatctctatgtgtgttatttgacagattggaagcctaggtgaggcggcttaggtgaggttataagagagagtggtaatggtgatatttattcatcaaaagaattctgtctcattgccttaaaataaaatggtttgccatatcaaaacagaggttttattgacttcaccttatgtgttttaaaaaaatttttataagataaaatttaccatcttacttctgggtatatatccggaactgaaagccaggtcttgaagagataactgtaaccccatgtctattgcagcattattcataacagctaaaacatggaagcaagccaagtgcccattagcaaaatgtgaggaaggaaattctgacacatgctacaacatggatgaaccttgaggacattatgctatgtgaaataagctagtaacaaaagaacaaaatactgtatgattccacttatgtcaggtatttagagtagtcaacatcatagagacagaaaacagaatggtggttgctagggactaagaggagtgggaaatggggagtcggcgtttaacaggtacagcagttgagttttacaagatgaaaagagttatggaaattgatggtggtgatggctgcacaactttatggaagtgcttaagattaatactattgaactagatacaggcatatttcgcagttattgcaggtttggttccagaccactgcaataatgagaatatcgcaataatgtaagtcacataaattttttggtttcccagtgcacataaaagttatgtttgtttgtttgccttcacaacgtcaattttcttaaaaatttctttttaacttttaaggtcaggggtacatgtgcagatttgttacataggtaaacttgtgtcatgggggtttgttttacagattatttcatcacccacgtattaagcctagtacccatttgttttttctgatcctctccctcctcccagcctccactctctgaaaagtcccagtgtgtgttgttccccagatgtggccatgtattctcatcatttagcttccacttgtaagtgagaacatgcggtatttggttttctaaaagttatgtttaggagtgacatcagaaagatggctgacaagagaggcctggtgctagtccactctcaacaaaaaaagaccgaggcaacagataaatagctaagatttgactggagtgtcagtgggagaaccctggagaataacgagagagtgcagaggcacctgtgctgcttagaagtccagtttggggtggctgtagtgtttcttaaataataccgcagtgaagtttgctgtatcagttaactcttcctttcacaaaatgtttctctgtagcatgagatgctgtttcgtaacattttacccacagcacagtgtctctcaaaattgtagtcaatcctctcaaactctaccactgctttatcaactgagtttatggaaaattctaagtcctttgttgtcatttcaacaatgttcacagcatcttcacaaggagtagattccatcgcaagaaaccactttctttgctcatccataagaagcaactcttcatctgttcaagtttaatcatgagattgcagcaatgcaggcacatcttcaggctgtacttccaagtctagttctttcgctattaccatcacacttgcagttacttcctccactgaagtctttaaccccttaaagtcatccatgagggttggaatggacttcttccaacctcctgttaatgctgatctttttacttcctcctatgaatcacaaatgttcttaataacatgaagaatgatgaatcctttccagaaggttttcaacttacttgatccagatccatcaaagcaatcattatttatggcagatattgccttataaaatgtatttcttaataataagacttgaaagtctaaaatactcatggatctatgggctacaaaatggatgttgtgttagcaggcatgaaaacaacattaatttccttgcatatttccatcagaccccttgggtgaccaggtgcattctcactgagcagtaacagtccaaagataatctttttttctcagcagtaggtctcaacagtgggcttaaaatattcagcaaaccatagtgcaaacaaatgtgctgccatccaggcttcattattccatttatagagcacaggcagagcagaatgagcataatttttaagggccctaggattttcaaaacagtaaatgaacattggcttcaacttagtcaccaccaccagcctgtcctttgaagctctgaagccaggcattgacttctcctctgtagctaggaaagtcttagatgacatcttccaatagaagacttgtttattctatattgaaattctgttgtttagggtagccaccttcatcaattatcttagctacatcttctggataacttgctgcagcttctccatcagtacttgctgcttcactttgtacttgtatggtctggagatagcttctttccttaaacgtcatgaaccaacctatgctagcttcaaacttttcttctgcagcttccttacctctttcagccttccagaattaaacagagttagagccttgctctgggttagactttggcttaaggaaatgttgtgactggtttaatcttctatccacaccactcaaactttctccatatcagaaagagaaaggctgtttcactttcttatcattcatgtgttcactggagtagaacttttaatttcctttaagaagtttttctttgcattcacaacttggctgtttggtgcaagaggcctagctttcacccagtctcagctttcaatatgccttcctcactaagtttaatcatttctagcttttgatttaaagtgagagatgtgtgactcttcctttcactttagcacatagaggccattgcagggttatcaatgggcctaatttcaatattgtgatgtctcagagaaaagggaggcctgaggagagagacagagacaaggtaatggcctgctggtggggcagtcagaacacatactacatttatcaattaaattcgccatcttatataggcgcagtttgttgtaccccaaaacaattacaatagtagcaccaaagaccactgatcacagatcagtgtaacagacataataatgatgaaaaggtttgaaatattgtgaaaagtaccaaactatgacacagaaatacaaagtgagcacataacattggaaaaacagtgccaatagacttgcttgacacaaggttgccacaaaccttcaatctgtaaaacacagaatgtctgtgaagcacaaaaaagcaaattgcaataatgaggtatgcttatgtttaaaaatggttaagatggtgaattttaggttatatgtattttaccacaataaaaaaaatttttttaattaccatcaaaaatgtgccattcagtagcatgaagtattgtgtgaccaatcttcaccttgcaaaatggagactcttgtacccaatgaacaacttgccattttcccctacctctagcaaccaccattttacttcctgtttttatgaatcttactactctggatatgtcatataagtataatccattaaagtggtatttttttgtttttctttgttttttttatgactggcttatttcatttaacataatgacctcaaggttcattcatgttgtggcatgtgtcagcatttccttccttttcaagaataaataacattcaactctatgtatatactacattttgcttatccatttgtctgtcaatgaacacttgggtttttctacttttgttgaataatgctcctatgaatattgttgaataatgctcctatgaacatgagtatagaaatacatcttagagatcctgctaattatgtggctttgtgttatttactcttttttaaataagtttttctctatgtgcagatctttagttgcaagtaatcttattttttaatatctatccagaggccttttttgctttctaatgggtgttttgatggttgagcctaatctctgattaaatgaatgattacaatacaatgtaaacatgtgaataatataattattggtaaaagtaatttttatttttaccctatgagtatgttgtatgtatgtatgtatggatggatgggtgggtggactgactgatttgattgcctgacagggtctctccttctgtctcccatgctggagtgcagtggcatgatctccgcccactgaaggcttgaccttctgggctcaagcgattttcccatctcagcctcctgagtagctaggactacaggcatgcaccgccacactcggttaatttttgtttactttttgtagagatgaggtcttactatgttgcccaggctggtttcaaactcctggactcaagcaatcctcccattttggcctcccaaagtgctggcatcacaggtgtgggccaccatacctcgctgagttatgtcttttaaatgtgtttccatctttacttttcattaaaccgtaagttccctaatgtagaattccaaatcctttacctaaataatttcacagataactctattaatttgtgtttttgactgtctacccagatgttgaatacctatgaacaacagcaggagccatggtttttcatcattacttttgaattagtagatgctatatgtatttcattactagcattggtgcactgctgataatgtatttgagaaagtattgtgactactacaattattattaggctggtgcaagtaataacagaatgatctatcccagtagagtcagaaagaacctgattttcagaatatacatgtattagtggaaaaatagaaaaagactctcaacacaactgtttatctaaggaccaatcctctaattacagctgttccagctttagatggctagaaaatgtgacaagacatctgggacccaaatggtacccactgtaaagatattgagacattctatgaaatttaagatagtataaaacaccaatatttgtggtaaacctttagaacttagaacactctcatatctcacattcaaagctcatgaaaaagaaactccttagagacagttcagcatgaaaacagccaaagctgcctttagatttcctgtcataacagactttacaagtatgttaaaaatgaacaaaatatatagaagagaaggtgtaatatttcaacgatcaataaatatgctaaaaataaagatatggtgtctatggtgttcatcttcaactttgttccctgaaatcaacaacaaaaatagaaattggttaatttgatgggttacattactgacatttagacaggacacatacattccattaacattttcagcagatttttagtacctttgatttgtctctaggcttcatcattacaagacgtatttctctatattcagaattgaaactcggttcccatggtaacctcttatactaaaatagagtctaggaatttaacctgttattctccatttctgccccattttgtaagtttaaaaaaattacaagtgtagctcaacttacacatattttttataaaccaattgagtaaatcaaaccataaagctgggagaagggggataatcccttaaagaaattctttgctcaatattctttttgtttctttttctttttaaagggaagattaattctgtaatagaattatatatttagttgtaagttctgttttcatcaagaagtcttaaaatgtgtcacacacataaatacatctgaaaactttaacattcagtattatataataagggttatcaagtttgtcaaggaaagtcagaatcagggaggagagaaaaaatggtttctttagaaactaactgctggaaaagtaagaaactcctaaaccaccattatcaactgcatttgataatgaaaagaaaggtttcactgaagcgtatttctagatagcattctttaaaaagtaaatttagtatttgtaggtgctttggtaagaacaaaacaaaaacaatagaaactacaaaaagcatgcattgtagcactactaatccagtgaagacaacagcactctgtgacctatgttcctccccagatcatcttcctctctccacaccaagccaggaccacattgctttcattaattttttttttttttttcatccagcactggcttcactgctgaggctctcgttatggtcttgttttctcctcaactgggagataagaaactcttcatcccagaatctttacaaactccccagtgctgtaataaacagtcagggttctcttgatataccactgactcttactttggacctctatctgagaaaattcacccaaaccattattggagtaaattaaaaactaatcttttcctaccagaaactaacatttatagagcacctattctaatatgacctacatattaagagtagcagcatacactgggaaggagaaggagaaaaataaaatctcagaagttgcttttttcactacaaagaacagagtgggggaaattttaatcttctataaaaaccttcaaaacagaaagatgggctgagcaggcatttcctttagaaatgaggagagtaagaaaaaggctgaaggaaagacaatgttcttttctgcaatgagtcagagaagaaacagtttgattagagagaagtggtagcaacagaaaggggagaagcagactactccttggtgttgactaaataaagaaaggaaattactaggaaatttcattccaggaatctactcttccaaccccaacagccttgtgcgtgctcctgacaacatcccaatcaggagcttctaactgaagtcacataagccaccaccaatgttgtagtgtctcaaagtgaaaaatttgcctccctaatatctataatccctagcttcctgactaggggtgagaaagtatctatctcattggaaaaagtggccatgtaatacaattctggctaatgacacataaaaataagggtttaggccaggtatggtggctcatacctctaatcccagcattttgggaggttgaggcaggaggattgcttgaggccaggagtttgaagctgcaataagctatgggctatgatcacaaacaccatattccagtctagatgacagagtgagacccttctcttaaaaaaaaatcaagtaaggttttctaggaaagttctgttttcttgatataggcacaatcctttctgttttttgctcttttctactgcctggaatacagacttgatggctagagatcctacatttactctgcaggcaggagaacaagcataataccctaaaagatggtgtcacagaaatgatttctaatgacatcatgaactcactctgccagtgccggatactctgcttttggatttctcatcaaatgagaaaagaaattaatcttattttgtttaaatcactgttatttgggtttattggtacatacagtcaaattcagtccttaactgatacatttctattcccaaatggaggatgtagggagaagcagaaggagcagcaatctgcagtttcactgcagaaacatcccaatttcaaacttgaagtccactattatacagagtagtttaaatatcactacgtctcagatacattatagttttaaaggtttttttacaggctgacctaaaaaacctatggcaaaatgccttttggcttccatactcaaaaattttaaaaataacccactcctaagataaaaataaacattcttacagagttaacaaaagttttaaaagcaacttaaataaaagaaggagtctattctgtcagatttttctttttggatgatttaataacaagatactattaaccaagatatgtttacacttaattttttattcaaatgtataatgtatgtgcttatacttctaaatattttccattgcttaatttaaaacctagtattaacatttagagtatctctttgtcatacacacaaaaaaagattaaaaaacaatttttaaaaaattttaaagaggaaaacaggttaggtttgttttaaaagttaatgggagggggcagctgcaattgcccagtaatgtttaactacacaatatgaaacacatgccacaatgcgcagctgagtctccagggagatacatgttcacagaagtgggacagagaggatgatgtttctgacttacaatttattaaaaaaaatactaggctcttcaatgagaaaataaagcaggaaatctcaagatagtaaccactgtcatatgtgatgtggttgctatggcaaatactttttttaagcacaaaaagaataatcatataaaattgacatcaatttctccagctgcagccgaattctgaccccagcttacaaaaacattttattttaacaataattttaacgttcagaattacctagttcctcaattttggccctaattccttcaactagttgctcatggaactaaaaacctattagcaataaagaataaagtaactatcattcattctctttgtggataagaaattttaaagaaaaaggttgcttttcatctccttcatgcatccccaaaacatttacaagtaaactaaattgtgagaaatataataccgtagaaaatacgtcagtccacccacaattattcattaagtttcctaatttgcacatcttctaaacaagtaaaaagtcctcataaaaatttaaatatataaagtaatttttaaaaatactttaacaaaataatttaatttttaacttcttagcatgattatgacaaagatattcaagtttagagaataaaataacaatcataactttagtaaagtatgtgtcaacatcaaaaagatttatgaagattacctaatttgttcttctaaaaatattttaagatgtgggtggttccacctcattaatggccttcgaaatgtgtcctttaatttgctgccaagagtatagtgaatacatataaaaaccaggatgttaacacagaagctactgacatcagttttttcctgaacttcaccatactgtattttaaaacaaagaaggataaacataacatggagaaggtccacagactattcataaaagattaaaaagcttagaaaataatacctgcacaaaggttaaagagactgaaattattcagccaagaaaagtcaagtctgagaaagaacttaataagtatccaagtatttatgaagggttctttgcacagaaaatagtgaccagctgttttcaatctccaatgaagtcagaatagaaggaaacaaaaattgaagcccaaagattttagttaaataaaaggaaggagttcctgtgcgagtaatgaatattgtaatggtcactgtatctatgaaaatgctttcttccaaggcctgtacaggaaagatattttcatttttacagggaagactaatatttacatccttgtgtgtgttttgtgctaataaaagaggtatcctacaaccaaaatgcatacaccagcaggtctgagctgggttatacttcgttaaacgtcccacggaccaagagcacacagaatagtagactatactcagtgcccacagggaactccaaaccactgcagccacaccttacctggattcctcgtacttttgtaaaggaaaatgaatgatttctaattgcccagaaatatgatgggtatttgcacccagctgcaagagggacctgtagtttactgctgtcacctttattgtcatatcccgggcaacattaacctcctaagttaaagaggaatggaacagtttttcataaaagaatggtaagtgagaaagtagttcccctacacattctcctacccttgccaattatttcttggcatctcaaattccatccttagtgatttactcctttggctcaaggctgtacgattctgggagaaaatgtatttcatgagcattaaacattattaggcattttattcctgtgtatctggtctctttccaaaacagattttgggggaaaaaagggaggaaggaaaggatatgagaaccgagagaaagatattactaagcaaagaatacggcatggaagtagatgctcagaacaaaacaaattgcctcatacttcacgattttgtctaggaacaatggatgaaccagggagtagagtcagtcttctcttcttggtatctctcctcaactgacactaatatctagtatcgtttccagagtaactcctaaaaagctaaagcagaacttcatttgctttctcttactaattaagtaaaactgcatatatgtgctgtccaaaataaactctgaaattttcaaaatcaacaaatactatatgcatatacaggtaagacatttttaaaatgtatatttagtaaatattatttaacccagtatttaagaaatgataaacatttatgaaaggttaatataagtaaataatatacaacctaaacataaccggttatttctccacccattcttttttgtttttctgagatagagtcttgctctgtcgcccaggctggagtgctgttgcgggatctcagctcactgcagcctctgcctcctgggttccagcgattctcctgcctcagcctcctgggtagctgggattacaggtgcatgccaccatgcccagctaatttttgtatttttagtagagacggggtttcaccgtgttggccaggctggtctcgaactcctgaccttaggtgatccccctgccttggcttcccaaagtgctgggattacaggcgtgagccactgcgcccggcctctccacccattcttaatacaacatggtctccacctacatcgccatccagctgcctctctgttcaatgtgctccagtgtatctccagccttcttaaatactccaggtaagttctaaacacaatactccaggtgagttctggctcctgagagcagagggaagctgtttatttccttgttctaaaaagtggttatctgtcctagctgcacctcagaagcacttgtagagtttttaaattttaaaaaacgtattttaaaagcagagatgcccaagccctgctctagtcttcagaccagcatctctgaagagcgactgttacaatacatacttgtgaggctggttatttggacccaaaagcagggtttatcttgtaaatcaagcccactgctccagcctgtggtgatcttttaggatcctcgttctatcctataacatatttttattttgttccacttcatgttatttgcaattctgatggaccttcaccttatagcttcatccaagtttctatgaaaaattttgagctagccagggctggaggccgaggtcctgtatcacaaaatgagaaatcttccggtaaacaatttattatttaacattgtagtcgactgaaatttagcaaccactgccgtgtgcccctggtgagcctttgtatcatagaggctagagagctgaacaccacatttctcagaattccttgcaactagagttctgggtaagtgcactctttcgcaactggggtggtgggggcggtggggggaagcaaacagaagctatatgcctgctagtttagttatttccttcttacaagccctgtcatagaggcttgattatttacagcagcattctagcatctagtcaccagtttcacaggtactgaggagtggttgcagtaatatttagtagctttctaatccctaaatagcagtgagggttgatttcaatctgtattactgaactcagcggcgccagcggtagcctctggattgctattcctcgttgtggcagtagtagttgttccttatatgctcacttttgtggtgttgtgggagtcactcttgaagcctatgctacacagccttctcctctaggctttccattgattttcttaacttctacatctttaatatggcttggctctatgcccccacctaaatctcacgttgaattttaattcccagtgctggaggggggactggtgggagatgattggatcacgggggtagtttctaacggtttagcaccatccccctagtgctgtctcgtggctgagttctcacaggatctggttgtttaaaagtgtatagccccacccgctttgctctttctcccgttcagccatgtaggacgtgccagcttccccgtccccttccaccatgattgcaggtttcctgaggcctccctagccatgcttcctgtacagcctgcagaaccataagcaaattataccccttttctttatatattacccagtctcacatagttctttatagcaatatgagaacacattaatacaatctctgacttaaattgctttgtgtgtggaatacctggagtagattctgtttcctccaataaactctcactgatataagcacatttgagtataactgttgcactctcataacaggaccaccagctaggtcacactacatagtgtctacaagggtatcatgaaagaccttgtcaaatactttcctaatatcctaagatacaatattcaaactctgcattttctctgaccttgaagtttagcaatgctgtcaaaaaaggaaattatattattctgatacgatttcttctcagtaatctatgctgacttataacgatcctgatctttcctaaaggactcttaaatgttctagaatcctgcccaagagggacattgagctcactggccccagagtagtgatgtgattctagtgtcaaccctgtgtctatatactggtttcatcacttacttgctaggaaatcttgaacagcattcccaagtctcagtttccttagtgctaaatggtagtgaaatgctattttataggatccttgtgaggagtaaataagataacatatacaaaatcctaagcacagtgtttggcctgtagtaggagctcaattagtaacagctataacctgagaaattcacctttttctccatttccaaaaataaaataaaataaaatgtaaatgtacttttatacttccatgacactctcctcattttctcaaagagatgtcaaatttcacaaacagtggaaaacagttctctcatctcaagtcgtatcaatagatattatcaaacacactctcggtcaggagatgccaagtgcgctgagtacttctctagcatttgctcatcttgccattcaaacccctcttattcatgttgatgctactcagttcattttggagatcatcattctctatagaagcccctttgactagcttactaaaaaaaagagagatggagcaaggtcttggaggaggcagggaaaggtggaggcaagaatttgccgtgggaagaacagagttgctcgatagctcagcatctctggtcccaggaagatatgatttttatcaccgcatgggaagcagggctgacaatgcccagggcttcccggatgctccctcttatcaagttgttggaaggataaattaatagggtggacagatgaatattatcctttattgattatcaactatatttaaaacactgctaggcatgttttgaatttacctaatacacacacctgcacatatacacacaacagagagacaaatatttatcactgaaactcagacagaattaagcaacacaattactaaatgatttggcttcacatcccatgctcttcactataccacatcatttgttcagaaaacatttcatgaactcttaccaagtgctaggtattgtattaggtatcaaaaatacagtgggaaataaacaaaagcacacgctcacaataaagcatgacagtgctgtaagagtgaaagcttggggtgagatgggagcctattagaggggcacttattcctaacctggggttgatagaggaagcaacctcttaactgagcctgagtgaatgaatatgatttagcaaaagaagcataaatcccacaggaggatttaggcattgcaagtggccaaaggtaaaaaagctctgtaagagctgagaagctggaagaaggatgaagagggaatagaaaggtaagtaggaaccagagcatatactgcttcttaactggtgttgagctttagcctataagcaattggtagtcactgggagggcataagcagaagagaaatgtgctgaaatctgtatggtggggagggaatgaagattggaggcagaggatcagtttagaagcctcacaagtgagaaactatgaggacttgcactaaagaaatgcaagcagagatcatgagaagagaatagggatatttagggggcagaactgatgagatgttacttccatgaagggtgaaggaagaaacggaaattaagaatgactcaatttttcaaccttattccaaagaccacatttaaaacacctatacagcttctctaggtacttgcatgataacatttcactttttttctgtaaagtagggagcaacgtcatctactgaaactgagatgggaggcaggaagaagagatctagtgaagatctaaactagccactctgtagaatgaggaattgctgaacagagaaacacaggcctccaggaaagttgagggcccaaatgggggagaaggtcttgatctggcagccctcatctgtgcagatggaagattatctccagcagcactcaatagccagggtaaagatgcagagaagatgaacactgagactggaccatatcaaagttttccaggagaggcagaaaagacaagacattagggcagtggagtttagaatataagagagtggcagaagcaatgaaatatagcctctaagaggagtttagaacataagagagtggcagaagcaatgaaataatgaaatatagcctctaagaggagtttagaacatacgagagtggcagaagcaacgaaataatgaaatatagcctctaagctggatatagaagtgaagggagggtgtgctaataaaaagaaagcagactaggaactagggtcagggaactagagggctctcatgatagcatttcccaaaatgtgtttctcagatgcttattacacaggatgttaatcactgatacgttcctcattaaaagcttttcatggtcaaataagtgaaggaaagtttgggtaatgtaatttttaaactgtttccttcctgtactatttgtatttaataagttaataatatatactgtagttctctaataatttatctctaggataaatatgcatttcccaaataattctgattactgtatattatttatctatatttatcagagaatttcactgaatgggtatcttaaggaacacattttcagagggtctgctctgtgaaatgagaagcagggatggtagaacacttgaaaagaaagtatcttaccaaggcaggaggtttacctgaaagttctcttagcttccagagctatgtatctttaattctactataacacacacacacacacacacacacacacacacacacacacacacacagcttgactctgactctactgtaattagtattcattcatgaaaccaatattccaagagcatgtactattatgtggcagaggagatttatacagcattcttaccaggacaaacttcgtgacttatctggagaaacaacagatacacacatgaaaaataaaaacctggctggaaaatatggctcttcctcagatacccataagacatagtttccctccagggcaactagtgctaccaatctagccacagctctgtaagatcagaaagttcctccataaaaacagagctaactgagtagatctgagctgaacaaactaaaaagccccagtctttctttgctgaagctactactctcccagagtcacccatgatgaaataatctctcctaccccatcagtttgatgacatagattcttgacctggtcctaatctactccaggataataaatcctaaattgattttcttgaatgacaaccaacctgcttttacccagtgtcaagcattcagaattccaactggcacagactagtatggataaaacataatccataaggaagaagtagagatccacatgtaaataatggctagtgccagactgtgaaggatcttggtgacacagctgaagcctggacattccatggggaatgaggaggccttagggatatctgaataggaagactgggagcgggagggtaaaagtaatgccatcattgctaaaaacaggtttagaaagttattcttgggacatgcccatagggtccacgtccattttttaaaaggcagatcaaattttaaaatactttttgtcatttttctccacttcccttcaaagggtctgtgggtaattttcctttctagaggtaaggaaaataggcccataatttctagcttcatggttaaaggtataaaagagtaagtgtaaacataatttaaactgacaaggatgttaaatcaggcaactcacttgaaactccaatggaaaaagagatgaaattctaaatcttcagtacacattgtagagattttagaaaaccaaaaataatatactgctatcatcttattagggaacaaaaatgctaaagacacattagcaaatgtggctttgactgatgtgacataagctgagacctcataccaactaatttaagaagttttaaagatttagatcacgagaaaaacaaaactacaataattatatggtttcagaaaaagtaagtcttccctcaataacttcttcacatactttactactgctatactacaatatgacaatccctaggggttatactaacatcacttgattagaattttggaaacactgaagtctcacattacagaatgatgtctaacttgtaaaaacaaaaaacacagaaagttggctcatgggatttaaaatttgctgaggtccataaaacaactgcagctataaaaaccacttatctgttcaacttcaaaattggttttcactaaaatctctgtgacaaaaagtcatacctatacaatcagttataacaaaattataacatgtattgatttttgtggatgtcaaatctaaaagtcactatacaaaatgtcagaaatctgtggtataaagtatgatgtcggaaacatcatcattagtctctcttccttgaaatataatacactgcaatctaaatgaattagattctataaagactcatttttcttaactattatatatatgctgatgttcaactatatgactgcatgaaaagttgttcatatagtttcataaggagctcagtaactccctaaagacacaaaaaagcactcaatgatctaattgatctgttaagaatcataaaatttgagttaaaaattatatcagcttatggaaaattgatattacatgttgatgaaaaatgtgttaactgttttaccacagagtctttgtgatccacttgtaccccaacactagctggttctggaggccataagaccatcctctgcagtggagtgaggcacgttatggatgcagaaaacttactctagtcagatgcccagctaggaatttcaggaaatccaagatgtaggctgctttccaggaaaaaggcacagaagacccaccaatggcaggagatagaaaattcatactccacccccaggattatggcaatatagcaatctattacattttgtgcttcatgatcctctctatccaaagtacatatgcaaccatagtgggctacacagaactagggaatgtgaagaaagcagcagtactgagccacgtgacttgaagttatgggtcagacctcatggcggagtagcaaaaagaaaagggtgggcaaaaaggaaatggaagtatctgagagaaaattctggtatccattttgcagtaccagcaaatcacttgaatatttacaattttctaggttctacaatgctagaagtcatgtaattctgctgttctgccatggagaggcaatactcttcagtggaaagcagcctagtgcttgcttagactttgacactaaccacacaggactagggtaggagcatgacaggaagaaaaaggtcagttggtgctaagagaaaattcatttttgcctataactgtgaaatcacaatgacctacgatgttaactgcagtatcttaaaaaactgtttttaaaaaagagaagtgctagtctgtgaaagcattcctattgtcatcactttgtaagcaacagaggtcagagagaatgtttgatcatcattttagccactgcagcacccccagcactgtgcctcacatatgataagcagcagtaaatattcatgcaactgaatcttctgtatgagcatccctgtctcttaatccttctttctagtgcttcttattttcccaccttatttcttcccatagctcgcactgctctttgtggtttaactgataatttggacaacataaaataatagtctgttgaatttactggaagataattttaggttcacttttttaattgggaaagtaaatgttaggaacactatctttttctctctaaaatactttgcaaattaagccgtgggttagcaaccttcaacagaaaaaagttccataactctaagttgaagatgtgttgttttctgctatattaaaatacaattttaaaaaggtgacttgtgccatactcttttttactgttacataaatctaagaaacaaaattttccacagttggctataaaaagtaacacagaactagcctggttcctataaaagtatcctttcgaattagaaaactaatatttaatgtaaaaaagccacatacttttcatagttccatcttcttcttcctcatcctcactgtttatcaccatggtccccaagtcggattccaacatcgtgctattatgttcaatcatggtctgggccccttcactcatcgtgcttgtggcccgcatggtgcccacactctccacactagtcttcaccatggtgtgggaatccagctcatcttcatcctgcaagcaaaatactgcaatgagggaagacttttctatgacagctggatttcttaattcttaacaagagaatgaatatattatagttttaatacttattaaaaatactattagtactgattttaatataaatacatacatacaaatgttattttaagagtgaaaattattcaaaataacctaaagctttaggtaattacagatcaagcaacagaaactgatgaagtagaaggctgctagttgcttttaaaataaggattaagataggtaaactatcagcaaatgcataacaaagaatatggtgacaaaacaactaaatatatatgagagcacctttaagacagaacacattgacactttgtattataatgggcataatgatgtctataaccttgtaaaacagccattagctttttcttttaaattatggcaaaatatacaaatacatatatataaaattcaccattttagcaatttttaagtgtataactctgtagcactaagtatatttacaatgttgtgcaaccaccaccattatatgtttacagaactcttcattccccctttccccagccctggcaacctctattgtacttacaagaggtatctagaataggcaaattcatgagtactactattcataccatagtactaattcataattactattatacttatgaatttgcctattctagatacctcatgtaagtggaatcatacaatatattttgctgagcctaatgcattcaagattcatgcatattgtggtagaaaaatttcattcctttttaaggctgaatgatattccattgtatgaatacaccacattttgtttccctatttatctgttgatggccatttggattgttgacacctttggctactgtgaatagtgctaatgtgaacactgacctacaagtatctgtttgaatccctattttcagtttggttgggtatctacctagaagtacaattgctggatcacatggtaacttcatatttaattttttaagtgcccaaactgttttccacagtggctataccattttacactcccaccagcaatgcacaggattccaacttctccacatccttggcaacacttgttattttccatttttaaaaaataatagccatcctaatgaacatgaagtgttatcacattgtagtttgatctgcatctccctaatgactactgatgttgagcaatcttttcgcacgcttattagccatttgtatatcttctttggagaaatatccatttacccattttaaaatgggttgtttggtttttctgttgttattacaaattctggatattaattccttaccagagatataatttgcaaatattttctcccattctgtgtgctttttacttcatttatagcgtcttttgatgtaagtttttaattttgatgaagtctgatttatcaattttttgcttttgttgacaaatctcagcttttaaatgtttcacagaagaatcaagtcagtaataaaagtacaaattaaaagtgctctttagaacattcaccaaagatatactggaatagggtcataaaaataaattaacaaatcctgtttgaaagaccaactgataatcacagtgctttgggaggtcagggcagaaggccaggagtttgagaccagcctaggcaatgcagcaagaccttgcctccacaaaaaatttaaaaattagctgaacacggtggtgtgcctgtagtcctagctacttgatgggctgaggctggaagactgcctgagctcaagagtttgaggctacagtgagctatgatggtgccactgctctccagccggggtgacagagcaagaccccatttcaaaaagaaagaaaggaccaaagaatctgctatttagaaaaacttgattacgcacggaaattcatttatatttattccatttttagtagaaacatataagcaaaatctagttctggcagaggtcaaaatgcaaatctgagaacatcaatgttgagtttcagcaacttgggttgtataatataacaacagttggacagctgtttgatacctttcctcttcctaaacctacatgctaagcttgggcattaggtctcaaagtcgtttgcacttctttcatgatcctttctcttttagaagacctcttcattctcatgccttcaactatctaataagttgaggagtctcaaatcctgaaatcttcctatgtctttacttattacgtaaatacttaaagatgtctaaaatttgacagtcccaaatcagatattatttcatttatctctccagtctctcctatctgtctccatccccaacaaccaccacaaagcatggtaatcttcacttgctacataaaacttcaatgtcttcttacatttattttctctttcattccctatatatgcatcagtcaactagttctttaaataattctctcttagctccatctcttcttttccattcccactgctactgggtataatcctcactacatcataggtggtttactgcagctaatgcttcctgactgaggactctcccatctaactttctagagtcagacagacattagttcaaatcctggctcaaatcacttatgaggcataggatccttgtctccaaagattgatgattaaataaaaaggtaagcaaaatgcctgcatgctacctggaacaaggtagtttcacaccttcctcaaagtacacggcattatactaacctttcttgaatactatttctatcattctaatgaagaatctacaatggctcccagttcctgccttcattaaagctaaacatttctgcctaaatttcaatgtcttctatggaccaatcctattttcccattgttcatataacctccaatacaggcaggctggactttaactgaatctctttgccataactccatatgatgctatgttcattaaagacttcctttgtgtacgtcttattctctatccagaaggtccttcccctctatccatttaactaaatcatacctagtttcagatcaagtatctactacttccatggctaattcagtctttgttaattattctcttttctaaacttccatagaatttacaaccggcattagacacttctgtattcaatttatgatctcatattgcaagcaattgttttgcaaaatcttttataaatgtaagtaccctatggacaagaatgtcttagagtacctctgaatccactaaagtgcttcattcagtattcaaaacacagtaagggtttgtgaaagttgtcagaatcaaaatgaagtcatttctgtttaaaacaacaaaaaaacaaacaaaaaccaaccctgacaaatggagcaagggaaagccataaagagatggtcctcatgcataaatgcctgatagcgaaagctatcacaaaagactgccagaaccactatcttgcacaaaggccattgcaatcttacatgaaaaatactgcgaggacatctacccagcaactgcctatccaaccacagactggcgcacaaggataagcacttcaaaacaattaggcagttctccccatttttcctttaaaaacctttgtcttcctttaccccccgaatatgcacattgttttgtatagcacctttactcgcactgccctattctaaaataaatgttactttcttttagagagtctttgctatttaggttgacacgttcaatacatattgactttttcatggaattataaaatcaaggacctttacagttagagagaaactaattcaaaccatcattttatatctgaaaacactgaggtccacagaaaataagagacttccctaaggtcacacacctacttaaaagtaggtctgggactaagaaacaagttcttttatttcttagcccattattctactatatacatgtacctgaattatgtttaaatttttctctactcaaatgcttaagttggagatgtaagctcacaatttttaaaagcttatatcaccaccttctattcccagagtcccatataaattattccatccattctagtccaagccaccatcttctcccacttggagcatgaaaatagcctactgactgttcttattgtttccatttttgccccttttagtctcactcacataggcagattgatcccttcagaagacaaatgacatgttactctcctgctaagaactctgcatttggcctcctatcacacttagaataagatccaaaacctttatcatgtccaaatgtgatctggcctatcccatctagtaatatctgccaatcccatctcctatcacattccttcttgctcaccaagctctaaccaagctgacctcctttgctgtttcttgagcattctaaacatgttcttccttttgagcctttaaattggctgatctctcagactggaatgctcatccataaatcagtttgataatttatttaactcaggtatctatttagctgtgacctcttcggtgaagctttttctgaccaccaatctaaactaaagcctccatcattttccattcttctgtattcttcacagtctatatctggcctttacgaccactagaatgtaagtctgatgaagacaagagactgttttaacctctgaatcctcattattaaaacacctagcatacagtaggtacttgataaatatttatttaatgaataaatcaatttatattttcacttattaatcatccaacaagcatttattgtacatcaagtagtacaccagacattggagatgaataagatagtttaattccatttcagtttttagggagtttgagatctaagggaaatctactaccatgtgaacaataagttacaggacaatctattaagtgctacaagaaaagtgttgacagtaaaatgggaataccaagagtagagcctctaactctgcctttagaaagtgaagaaggtctcacagaggaggctgaacttgagtcagctcttaaaagatgagtagactatatatttaacatacaacagatacatttgggtggagtgttttacaactttttacattagaactacactcagacacattccttctcagctcagacaccccaagattgaattaggtgtcatgcctctgtattcccatagtactctgtgcttatgctgattttacagtactgtaattgtctattcacttaccttgtctaaatcccccattagactctcaaatctataagggcagtaaccacatcttgtttacagttgtattcctgatgtctggtaaaaagcaatgttcttattatgtaatttattgaatgaatgttaaatgcctcattatgaggtaatgccaaaacacagaatgaaggacaattttatgaggttctagtaacatgttcttattataaaacatagaatagctattaaagatattatactttgggacaggaaataatgccattaactacaattattcagttgatcatttatttaataatgaaaaaacacttatcaatgagttagaagcactatgctaaggtctttttaattctctttcggctgggcatgggggctcacgcctttaatctcgacactttgggaggccgaggtggttggatcacctgatggcaggatttcaagaccagcctggccaacatagtgaaactccatctctactaaaaatacaaaaaattagccaggcatggtggcacgttcctgtaatcccagctacttagaaggctgatgcaggagaatcatttgaacccgggaggcagaggttgcagtgaaccaagatggcacctgggagacagagtgagactccatcccaaagggaaaaaaaaaaaaagtctcttattaaccctcagaggtgctattattcctcttaggcaaaggaacctgaggctcaaataggtttcataatttgtccaaggtcatacaacaaataagtagagaagcaagaattctaggcaggtctaattctaaagcctaagacctaccttctaattatgtaaggcttttaaactatctacagcatttctcaagccccatttaactcatactacaggtttgcaagaacatgtttcattttccgaagtaaagagatgaagatgattttctatcagttccttttttcaaatctgctggttgaatatcttattttgtcacggttgcaaccagtttattcccaaaacactaactctattttaacacgtgtgagtcatttttctcttatccttgtgagattcaatgctgtgaccattaaacttaacaagaaacataacatctgattggtataaaatagtccttagcctccctatattctacattagagttgaatctacaaagggacaataaagcctgaacctctggattcacacaattggcttagataaaattgtaaaaacattgaattaagtttggaagggattgatcttactgcatattatttttacttacgtagtcaatttgctaaagaatgctaatctaatttacaaattgacagtaaaaaatagcaataaaaatagcatgaacactcaattcactaatgagagggtgacacacaaatagaaattaataaagtacagatggaatgataactagttaaacgaaattagaaaactcacttataatttggtgatggtgttgaaaacttttaagccacagcttttactttttaaaattcttaacttattcttgatattttagattagtattataatttcatttgatactttttatatttttataatgaaacatttatgttttttcaaaattatatttcacttacatatactctgttattcctcacaaaagaaaagcagaagaaaaacatgttgatacttcatagaaaaaggtctgcagaacagatgcttccccactgtagaaagcagccaattccagtaaggaatacaatagcattttcaatcagtggccatcatgtgccaggaatgcaaaacacagtactgatgataatccagtttatgaatcataaaatccacatggaatacaaatatttgaaaacattattaggaaatcctactccactgctaagacatgcttatgctaaaacagcctgagaaataatcagagattttgcattatctactagtagatatttgtaatatctactaccttaaagcattttctaaatactcagtaattgactgaattaaggataaaaagtatttatcacttgtgagactaatttgtcattagtgtcacaaaagacaaatactttagaatataaaattgtttctatattctcaaaatgtttagaatataaaaatagaatatttctcagttaggatacctgtttagtgagacagttagactactccttaaacaggtgtcctaaacggaaaatattctaattttatttttcttcttaaaatgacattaaacacttctttattgcacatgcaatcacataacagcatagtatcagtatcagagcagtgatcttaatggctttcattcaactggacaattctaacgagtatgcattctgctatagcatgaaaaaaatattcttcagaaaaaaacgtgtaaaatatatacttgaaacaattatacaaaaagttgcattatagtggtctaaatatttttaaaacctcttaaaggtgctaattaaacagcaaacaataaatgtaacaaacatactacaaatacatagctgagttttcaagatagtaagggctcaaaacggagctatggtaataagccaaatctaacttgaaggcttctttagaggcatgtgatgatgggggtgggggattagtggttaaataaggtttatattttaacagataaaagggaaaagggaagtatttggattctttccaaagtagaaatgaaacctccacttaaaattgggaattttgaaagtctacatcctcagcaaaaggataggcaagaaacaatttacccagtggcaaaggagatgacaagtcttacctgagctaggtaaggtaggggacagggattgggaagcctccctaaggtaggggacagggattgggaagcctccctttagaatttataaccatggtttaggccttcaattttacatcactcacacgctctaggggaacctcaaactgagaagttaaccaaatatagccccagtaaggtagcaccccaggtgcctgatagaaacaaatacaaatccatattacagggacgcatactgaaccctcaactcacaccattctcagagataaaatctagccaaacgtgaactcactatcccaaagataaatacatgagtaaacaagccactgagaatgggtagaaagaacaaacaacagaattaagatgcccttgctccttagaattaatttagtccccttagaaagctggatcttggggtaaaattagggaagaatagacagtggcattctaaactgcagaaataaccgagaacaaaagtagaaatattccagctagaatggaaagcaatgagtaagtttgattgaattagggaatgtcctacagctcatggatgctttcaacactgggagcccagcataagttgcttggcaaaggagtgataggaaccttgggaactaaaagatgatttggagaagggaaagactggagaaagactagaatcagacggttattactagaatccagatttgaggataattaattagagcctgtactaaaaagggtcatatagtaacagaaatgacaagctgaatctgaaagaaatcaccaaagaggaattaacattttctagaaagtttctaggcagtcaaatataatggatcaacaataactccaatattcagaacctaaagagatcaaactgaatctaaagagaaagttgagagagattttaatttgaataaaataggtaacaccagttatttgtaatcaaaaaatgacttactatactttgtcacttgaccatatgatcaaggaaatgaaatctaattattcattttcccatcaagtaagaaatcaacaaggcatgtccaatgcaactgcaagatgagcacaaaactggggaaaactagggtaagaatctttcacttctttcctcatgcataacggaattcgggggctggtgactgcttgatgctaacatgttaacctaggtcgataaatatattttaatcactgagttagaaaggcaaaaatcaaagggtactatcgtacatttgcttgtatgtctcgaatcatgtaagattcctactaaactaaaaacactctttcctatagcaaggtgaaactactgatgtgaccaacagagcattaccttgaaactgtacttccaactctggtaaaggatagcagttatcccattgtccttgttattaatacacaaggttgtacctgtttgttgtttctgtgttccaagtgaaattgcccacagtagatcaactggtaactctgatccaactgagctaaaaattactgagaaaacatcaaaaatagtctctttcaaatagccgcccttaagtgccacttcaatgtctgacgggctgaaaaaagtaacaaattggtattcacccattaaaaactaagatttacagtatctgaaaatctataaaaagaattaattgtcttctcactgctgtaagtaggtggtctttccctttcactacgaaatcagcttaatagcttatacagctgctgtctttgacatacctgtctttagcaaacagaaacttcatggatcctaactttttgcacattcacaggcatgttttaaagttacatcaaagctttcaggatctccaaacgtcataaaagacttattcatcagtataacaagcctaattggtgaaaaggcatgtgggcaggacttcagaggctccatgatgcaagactgtacaagtttttggcattataggagaagtttccaaacaaaagattaccttacatctcctgtgcacaatactaatatacaatagagtaaattaaaagtaaaagcaaccttaaccgtgacatttcttttttctttcacagccaaaagcatgtcaaaggattgacaaatataaagaaacttataaaatcaaatattttaaaataagaatgacacctttaaaaactgttgtgttcttacaagcagtttataaaacatccacaagagggaaccaaagacaaaagactaaaattccactatttggagatttacacaaataggtttataaaataggttattacattaactaacataccatcaatagctttcagaaataggctaatggtttcttgatacatttttaagcagtgatatatttaaaaatactgtaaccactgtcatgttgatacctttatataagcaatgtttatgttcctcaaggacaacaaatgtctttcacattcagtaacctccacttgcatataatagcatgaactcaatgaacaggtggtgattccacaaaatttatagaagtatacaaaagtaaataatgaatattcatattaatttatcaaaacttcattctaaattgcttttatatgaaaagatttatgattgtatatatcttatgttcttagaacaaatacaactaagggctaaagggtctttaaaaagatttttttcttttcttcattctttctttctctcattccttttctcttccattatgatagtatttttaagagttagcagaaattttgttgttgttctttttggtttgttggtagtaaacagaaattttaatacataaattgtatttttattgtttaaattttaacaacagaaatatcacctacataaacttagatataattttgtaaaataattttagaaaatttccaaaacatacaattcaaaagaagactacttgaaacatgctaaagtaacaatattgattttaacatacagtttacatcactgaacttcctgataaaaatgaaattctggggcagaaaaatgtcagggcaacaaaaaacaatctcccccacaacccaaatatttttcacacatttgacttaagcattgctgaagaaatacttcatgtgcaagtatacaccttattaattattaaatgcaaatacattctgtgttgatgattttgtggctggcactatccttaatgatgagtaaaagtcaggcaaaacctgtttaaaacagttttatacacgtgtttcttgatttgataagtatttaccaattaaatatttatgtaataaatgtttgctgtgtgccaggcaagtgtgttaaggtataatcttttccttgagaaatgtatagtttaatggggagttacaaaatagacaaacacagtgagataaatattctcagagctaaacgcagtattccatggtgaacacagaggagcacttgccaaactgaagcctggaggagccccatgaaaggcttcctctttccagaggaggcaatggctaggatgtcaagacaaaagcagcaacctacacttttctttaaccactttttgagcaatccaatctatgctcatggtttaactaccaactgcggaaagcactgatttcctaatttgcctgagttctcccttgggattcagaccgctgtatccaactgcctgctacacaaaatgacttaaatgacctatggacatcgcaaattaaataactgctaaagtgatctcatcttacacagaaatacgccttggagagaatactgctggagaatacttcagccacagtgtaagtgcaaagtgaaaaaacaaaggctctgactatgctatcaagaagtttagttgtaaataatttgttgttttttcccttattttttaaatggtcaaaggataactatattttgaatgaggaaaaagggcccagaagaaagggataatgtagctgactaaagaaacaagcagagaaggggccttttgagggaagtaaaaagaaaaccaagagcaataaaacaattactgttcatgcatacctctatcacagtacttgctacattgcattatgatcagttatcagtttatttgtctcactcattagattgcaatcttcttataggcaattaccatgtcttatttttcttccatatccatatttataaatgggaaaaatatataacctctgaaccagggagacaaggaaacatagtgaggatacagaaacatattaaagttaaaagaaaactgaggtctagttagtacaataagaaaaaagttataaagattggaaagaaactatctatatttgcagatgacatcattgtctgtgtagaaaatttcacagaatctacaaaaaactcctagaactaataaaaattagtgtgtgtggcaacgtcacaggatacaagggcaatacacaaaagtcaattgctttcttacataccagcaataaatgactgaaatttgaaattaaaaaaaatttcaacagaaaaaaaacccacttaggtctaacatattaaaacatgtacaggatctgtatacactgatgcaaaaaataaaagatgatctaaataaattgagaaacaccccatgttcatgaatttgaagactcaatactgttaaaatgccatttcttcctaacttgatgtatagatttcattcaatcccaataagaattccaggaagttaatttagaaatgttgacaaaatgatcctttctatggaaatgcaaaaggcctagaacagccaaggcaatactgaatcagaaaaacaaaatttggccaggagaagaggctcacacctgtaatcccagcactttaggaggctgaagtgggtggattgcttgagcccaggagtttgagaccggcctgggcaacacagcaagacaccatctctataaaaaatacaaaaattagccacatgtggcagcatgcgcctacagtcccagctacttgggaggctgatgtgagaaaatcacttgagcccaggaggtcaaggctgcagtgagccgtgattgctgtcactgtactccaacctggttaacaaagcaagatgccgtgtccaaaaaagaaaagaaaaggaaaaagaaaattggaagattcagtgtccaatcttaaaacttctataacactacagtaatcaaaacagcacagtactggcaaaagaatacacacatatatcaatgatgtatcattgaaacagaataaagagctcagaaacagacctacacaaatatagtcaacagatttttgaaaatgacacaaaggcaactcattggagaaagaacagtcttttaatcaaatggtgctagaacaaccggatatccatacggaaaaaaaaaaaaaggacccagatatagaccttacagctttctcaaaaattaactcaaaatgcttcaaagacccatataacatgcaaaaccataaaacctatagaagaaaactcaggagaaaatctatgggaccttgagtttggtagtgaatttatagacaccaaaagcatgatccatggaaaaaagctggtatcatcataataaaactaaacacttcagctgggcatggtggctcatgcctggtaatcccagtacttcaggaggctgaggcaggaggattgtagtttgaggctacagtgagctatgatcatccactgcactcagcttgtgcgaaagaatgagaccctgtctctaaaaaaacaaaaggcaaaaactaaaaactagaaatctctgctctgtgaaagacactattaaagaatgaaaaggcaaatcaaaaatgggagaaaatatttgttaaatacttactttataaaggactcgtatccaaaatacacaaactcttaaaaattcacaataagaaaacagacaacacaatttaaaaatggggaaaaatattgaacatacactttgccaaagatatataaatggcaaataagcatataaaaagatgcccgacatcttcatcactaaggaattgcaaattaaaacgagataccactaaacaccttttagaatggttaaaatgcaaaaacaaacaaacaaaaaccctgaccatacaaactactggtgcgcagcaacagaaactctcattccttggttagtaggaatataaaatgatacaactttggaaaagagtttggcagtttcttactaagctgaacataccataagatccagcaactatgatcctagatacttactcaatgtacctgaaaacttatatccatacaaaagccagcatatgaatgtatacagcagctttatttattgataactgccccaaactaataagtaactattgaagatggccttcaataagttaatggataaatgaactgtcatgtatctctgcaatgtaatactattcagtgataaaatgggctattaagccacaaaaaaaaccatggatgactgttacaaaaaacgtagtgttaaatgaaaaaagccagtctgaaaaggctacataatatatgattccaattatatgatattctggaaaagccaaaactataaatggtaaacagatcagcggttgaaagggggttgggggagagttgattatgtgaagcacaatggattttttttaagggtgatgaaactgttctgtttgacagtacagtgtatcatgtgtatcgttttgatgcctaataccatgcgtttgtcaaaactttacatcataaagagtgaacctactgaggcaggaggatccctcgagaccaggagttctagaccagcctgagcaatatagtaagactcccatctccacaaaaaatgaaaaaaaaaaaaaaaaaaaaaaaaaaaagtcaggcctggtggtgcatgcctgtagtcccagctacttgggaggttgaggcaggaggatcgcttcagcccaaaagttcaagacagtgagctatgtttgtgccactgaactgtagcttgggtgaaagagagagacccagtctcaaaagcaacaacaacaacaataacaaaaagagtgaacccaatgtatgcaaaattaaaaaaaaaaatttaggaggtcaggggatcccagggtgaaatgtagaatgtggcaaaaaaaaaaaaagtaactgtattaaaaatatattgaaacaaattcactgaaggaggtgagaagaaaaggtactaacctaagtaactttggagtaagtgaactgtgaattctgttagactaaagacaaaagaaatgatacataagcagtgtaactgataatgttgttttccatgttttccacatgggttaagaattctgaaaccactatacatgtatactggagttgagaaacttagtaaatgaatgataggagccaggtttctcaccattggagttgtaggttataaacaagcaagaggacccatctagaataataatggattagagtcagacacaacagtataaattaatgtttagtttaatacagatacagatgtatacacatacatatatatacacacacacacgtgcctacatatatagttataaatgtgtatatacataggctagtatacacacatatatctccttgcctcataagctgagagggcacagaagcaacaacatcccacagtacaaaaaagtccccctggaatccaaacttgatttcctacagttttccagtaaaaggaagtaggctccttattctagtactggaacaggaaatatacaagatgagcctagaatatcttatagtgtcagagagtaaggaagagctaaaaacaaaacaaaaccgcacaatgatggggatatgtcatagggacaaaggagtcaaaacaaaaggttcccaatggccaaagctggaacaatttaagcaaaataaataaataaataaacatagtagtattggattataatccaaaatataaactaataaccatgagtcaatattgatgcgaatgactgaataaatggggagaagagacaaatctcctgtgtagaaaaaattctaaatactccatcctcaagaaagtggagaataaccccccacttcttaaatgtgagctgtgtactgtgacttccttccaaagagtacagtatgaaaagaaagaaagaataattttactgtaaagaaacatgacatgctacctcagtcatgtgatcctggttaacatcaacagtggtaagtcatgttgacagaataatttactcttgatgtgatgagacttatatttatctctgggtcttttcaaaaaccaataagcctcgtctcatcattagaaaaaaaaatcccaattgaaggacattctacaaaatgtctaaccattattacccaaaactctcaaggtcaccaaaaacaaggacattccgagaggctgcgacatcatgaaccctttctgtgcctggcttatatcatttaacgtcctccaggtaaatacgtgcttgccacaaatgacaaaatttcattcatttttatggtatatacataccatgtgaaattagccaagcacagaaagactaaagaagctgatctcatggaagtagagagtagaaatggtggtttccagaggtaggggaggcttgtagaggctaggggtggtagggagagattggtcaataaatacaaaattacagttaggaggaataagttctggtgttctgttgcatagtacagtgactgtggtcaacaatactgtatatttcaaaatggcagaagattttgaatgttcttaccacaaagaaatgataaatgcatgaggtgatggaaatgctaaatattctgatttgatttttacacaatgtatacatgtatcaaaatatcacactttaccctgtaaatatgtataatcgttatatatcaattttttttaaaaaagagaagcctaaggagacatgatgactaaatgtaatatggtaacttgatgggtcctaaaacacaaaaagaacattaggtaaaaactaagtaaatctgaaaagaataggcactttagtttcaaatctgtattaatattggttcattatttagacaaatgtatcatacgaatataagatattaataacagggaagactgaatgtgggtggtatatggaaactctctaaactatttttctatttcttctataaacctaaaactattcaaaaataaaaagttaacttaaaaaattgagaaaatcctttgctttttaatttgagcaaatatttattatctgttttatcacaaggcccaacactacaacccataagtcagtggttctcacccaggccacacattggaatctgttaggaaggtttttaaaaaaatcctgatgcctaggccctagcctacaaaaattaaatgagaaatttcccagaataaaaatcaagcattgttttttgtttgctttttccaaaagccaccactaccacaaagagaaagctcaaatgatatagcaatttattaaatattttacatactatatcgagtatcacaaatcccaaagaatcatgtttctattagaggtaataaagcatataaactctaagtgattaatgtctacaatttttatattgacaagaactctgtattccattacttcaccaaaaactttttgcagtttcttttcagagtatttttaaaatattttacaaatttcaatatgtatatgcttttaaaaaatgcacttaagtacattctattttcaaaatagcatcatttattcaataatatattttaaactttcatatggcagagacaattcccataaatttgctttatatcatacacaacactaccgtagaatgctccttggtaacaacaaaatgttgcattttgaagctttattgcatagaaagaccaattttgttaatacatactctttaaaggtggacttgccataagcaattcaagtgtttacagtaaatatgaacaaacagatatattatttaatcaactcatgctaaagatttgggaatatcttccactaatatccagaaaacgaattcttactatgtaatacagttgacccatctcaacacctaatttacatcacatactcagaaatgccaaaagaagatctttgtcatatttaacaacacttaaactaacacaaaaactttgatattggattaaccttctacagaaatctctgtttgcaatttgtttaattttagaaatctgtacaattacctcagcacctatcaaaacatgtcaatttgtcaagatacattctcatcagacaagctttttctataataggtataaaaatcaaattcataaggcactatttccaatcatgctccatacttttcttgaataaaaaatattttaaaagatttgtttataatagttacccagggcacaggtgtatgcactaaaattttaaaaaccaacatatcttgtaatggttatcatataccatttcctttttaaaagccacattataaattgatgaaaatggcaatttaattttaggcccctaatttttccccaactgcaataagccaaactagatagaagtaaattaaatttggaaatttttctttatattgttataacccatacattttctgaaaattatgttaagaatgcaggatccacacacaatagacccaagtatcaatacttgatgtgaaatataaatctctcccttaatgtagcagcgaatttcagttctgaaattctgaaatcagagaaaaaatttgatctacattatctaaaaagttagttttatgaaatttttcaatggtccaatgctaaacttgctctgtgtcattatttgctccaccactgcttaaggaccaatccagagtctggactggaaacagctacagtaaaagctgccagagaatacaggtcctctgggctgaaaataaatcagaagcaaaagttggcaatacagatctctcaccatgctgaaaagacctttcatccatgaaataatcaaaaaggagaaaaaagaatggagaaaaatttcactgaaaacaactgggacaccaaaatatccatctaaaactttccgccatatcctaaaagaaagtcagttccccagtaccaaaactaagtaggtaatggccaaatgaatccctcaaactaaagcaaaagaaaaaaagaaaagaaccagaaagtttcatgggccaaaggtaaccaagctaagctgtgaacacaaacaagaggttgcaatgcaacaaccttgacttaacagatacacatgttaagtcaagcacagtatcaattagataacaaggggtccaagcttgtactttcgttccataacctagacaaaattattgtaaaagacacagtggttaagaaaaagaaaaatatcatttatgtctattctttttgttgtgttgttgagacagggtctagctctgcagtggcgcaaagtcgactcaatgcaaccttagcctcctgggctcaagcaatccttccacctcagcctcctgagtagctgggactacaggtgagcaccaccatgcctggctaatttttgaatttttggtagagatggggttttgccatgttgctcaggctggtcttgaactcctgagcttaagctatccacctgccttggcctctgaaagtgctaggattacaggcatgagccaccgtgcctggaccatttacttctattctaatcaactataaatttggatatgatttgctttaattgtcctgattccttgtaatgctaccttacagaagttttcccttccctgcttgtcactttgacaacttgtctaaaacaaatcagaattgaacaaactatgattttttctttgaattgttctaatttatgggcactcaaggagtttgttaatcactgaaatatacggagggttttatagatttataaagagatcatattacaaactcaatatcaaaaattataattttaggccaggcacagtggctcacacctgtaatcccagcactttgggaggccgagacgggcaaatcacttgaggtcaggagttcaagacctgtctggccaacatggtgaaactctgtcactactaagagtacaaaaattacccaggcatggtggcaggcgcctataatcccagctactcgggagactgaggcaggaaaactgcttgaacccaggaggtggaggttgcagtgagctgagatcacaccactgcactccagcctgagcagcagagtgagactgtcttagatagatgatagatagatagatagatagatagatagatagatagatagatagatagactgatttaaaaaataaaataaaaattataattttagaacagtccaagaaattacaaatggcaggagctcccatcaaaatggagattagaacacacaggtttacacctatccctctcaaaaccctctcaaaactacaataaagccacagaaaaggataaaccccaaaagacaaacagcacaggaattgaatagataacagtatatgggagatgtcaaaaatgtggaagctagaaaaatgtttggaagttagaaaacagataaatatgtaagcagctaactcagcagaccaaaaataagacttaagcttgcaaagagaaaagtcacaagaagcatgtgaattcagagtagtgaaccctaacatcttttacagcaaaatttgctggtcaactagttccactcttacacacagagctgccagaggtaattttagtgcttctctcaaatataatccccgtacatttgaagaaagcccataaagtgaaatgtcagagatcaaaacaaacacaaaagaacagacacaaggcagggagcaaaagataactcaaaataataataatgaaataataacgtagaagagaaagctatcttagacattaaatatctgatatgaaaaaatagcaagtttggaagataaacttgaggcaatctcagaagaataaaaagagaaaaagagggaaaaggaaacagaaaagataattgaaagactaacctaaaaggttcaacaaccaaataaaaggagatccagagacagagaggagagacagtgaaaattaccaagaaatagcaaacatgaaatcacatagaactgaagggtgtttccagatttaaaaagtcaaaagacactccatacgatgaatggggaaaagatgtataccaaggcacattattaggaaagttttaaataacagggacaatgcaaagatccaaaaactcccacattcaaacattcaaagaatcaggtatctgaatggcatctatcttctcatcagcattattgctgagcaaggaaaaagagcaaggtcttcaaaattataaaagaaagttattttcaatccaaaattttacacccaatcaatcaatcaatcaattaagggtaaatgtacaataaagacacggtcagatatgcaatgactgaaaaaaactgctgctgtcaggaagctactgggagatatgatacataaaaataaggaagtaaaacaagaaagacagaagacagcatcagggataaagagattacagaagaaaaaaaagaggacattccacaggttgatgttgaaaggaagtcttaggatgacagctgctcaacactcctaaagaggaattagttccgattagtaaaggacagaagactattgaagggatgaatcaataaaaaaaaaaaagtacggcattaataaattgtgtttgaacatacacagaggagctcagagatccagcagagagtttgggaatatagcatttgggaacaaactagtgattagaaaactgtaaaaacaacaacagtaacaaaaacggagacaattattggttctgaaaatcacaaaaagaaataacatgtaatgataatatgatataagtgaacagtatttacacagttataactatataagaatttgttttaattgtgattacataggaaaaattagacataacaagtaatcaattcttttacaagttttcaatttgtggtaaataattttatctgaaatatttcttattaaataaaatttactttttaccatgtaaaggaatgagaataagtaaatgttctttactggttttcctcaaaaaaaaaaaatatgtgtgtgtgtgtgtgtgtgtatgtatatttatacacattttcaaatatatgtatacaaatatacatatctatacttatatttaggaaaaccagtaaagaacaaatacatattacatattaataaaaataaaaatattaaagaatataaaaatatatattgtaaaaatataaatatataataaatatataaatatatatatgttttttctttttagacagagagagagagagataaagagagtctcactttgtcacccaggctggggtgcagtggcatgatcatggctcactgcagcctcaactgcccaggctcaaaccatcctcccacctcaggctcccaaatagctgggactacaggcatgcatcaccaagcctagctaattttgtgttttttaatttttttttttgtagagacagggtttcactatgttgcccaggctggtcttgaacacctgggctcaagcaatcagcctgtcttggcctcccaaagtgctgggattacaggcgtgagccaccgtgcctggcccaaatatatttatttttaattttaaaactagatttaatatctaccaactcttccaaacatatttgaccagttaaaatttgttttaaaatgttttttaaaaaattgaatctatatcagttcacaccagatcagtaatgttattttggtggccacaaggtagggcaaaaccagtaagggcaaccagcaaaaaaaacccgaaaactaaacaaacagaacaataacaaaaacaaaaaacctggccaaaatgttacaacagcagtagtgatggtataagtagtggcattaataaaaacaaaagctaaactttattgagcatactatgtgcaaaacattgttctaggtgtgtatatatgtaattatatcctcataacaactctatttgcagatggtaaaactgaagtagagaggttaagtaacctgcccaaagacataaagttatttgggaacagaactagaattcacatccagatagtatgatctatttttagataatgcaacctcccttttaccaagtaagtacattacaggcttctggactgacttgggctaattctcctgctgttcttttctttacctaattcaaaaggttctcaaaaggtagacttttggccagaaacagtggctcaggcctgtaatcccagcactttgagaggccaaggcgggtggatcacttgaggtcaggagttcaagaccagcctggccaacatggctaaaccttgtctctactaaaaatacaaaaattagctgggcatggtggcacacgcctgtaaccctagctacctgggaggctgaggcaggagaatcgcttgaacccaggaggcagaggttgcagtaagccggggatcacgccactgcactccagcctgggcgagagagtgagactccatctcaaagaaaaaaagaaggtagacttttgaaggtccctattgaacaggggtaaggggaaagaggggaaggcgggggaagtttctgtctaagaaatgctcacctgaaactgtatcaccacctgaggggaatgggttattcaaagcaccctggcatttctccccacacccatgctgagaattaattgctttagtgaagcatgtttaaagagaacatgacattattcagacattaaggaccgcaacctgaacagctctgagttcagaccataagaggtcaccagaaagtcctcatttcttttccaaggatagaagctctaagacatagtctaagaccaattagacttcttttctttgagtcattaataagttaatatgaagtcaaataacacctttcttcagataaaagtaaaggacctgatacatgcataaaagtgaaaagatttcattcaagcttaacatcaaaaagtatcccattttttgctcaacatttcacttaaaattcttctacatccatttaactccttgtattttacttaacattgtgatccttaagaaacgtctgagctccagtgacaagcaattcttctaaactccttatcagtcttttaaagtgctttaaaaatagcatgtcaatgctacattctatgccttatcttataaattcaattaacatcattctgctttgaaaatcatcatccaatgtaccacatgtagaatatttgctttgctgttttacttaaaaacaagtactcttttactgtataaatatttaaaaactcattcaagtacctgtacaatattcaataagccataccagcaaacttacaaattagtattttaaaaatcatcaactaagttcaagaaatacataagaatgaatactgcttgttgtgtaactaccaaattaccaaactgcatgcttacattttgaatactagagttaaactagtactaactgcacaaatcctgtatgcctgctttttatatacacaacctagattaaactttgtgttcatttagtcaaaaatgaatgtaaattttataaaaaatattttacttttatgaaaaagagtatcacttcaatgaaataaattgtcctactgaacatcaagagatgtgtagtctatgataaattagctgatttaaaactgtatatgtaattcaatttaagccaattcacaaaagaatcccaaaggaataaatgatataaactatttaagattctgagccttcaatgtggataaactttcctgagaaattacatctactaattttaaaagttgctaaaaataaatggcaatgtaggatatacatttactgtagaaagacttcagattcattctgcctatctcgttcttttaagtgcttgtgagagtgtatgtgtgtacatattgtatattttctatgcagggcaacaacagataaaataacctcaaaatggaagctactgcctgaaaaaataatctgaagaaagcatgtgaatattgctcaatgtgtgactctccaaactttttacttttttcttataatttcagtaaaaaagactataagagttttacccagaaacactaagctttgccccagagaataaatgtttattcaggaaaaaaaaatcataaaaacctgacataatttttaagtgctcataatatttcccctcaccttgaatatggacaggaccaagtaacatatacctaaaacgacttggtatcattggatttgaaactaagcagtgggcagaagctagaagcactttgaagacagttttagtaagagcctgaagagtcattaaaaaactgtcagaagcctgacagcctttaagaaagtttcaggaaggtaagggaaatattagaaagctggagaaaaggagattcttatgtggtggcagaaaatttagaaactgttgtattagtccattctcacactgctatgaaggaatacctgggtaatttataaagaaaagaggtttaattgattcacagttccacatggctggggaggcctcagaaaatttacaatcatggcagaaagcacctcttcacagggcagcaggagagagaactgctgagcaaagtggggaaagccccttataaaaccatcagatctcctgagaactcattcactatcacaagaacggggtggttgttccctgattcagttacctcccaccaggtccctcccatgacgcgtgaggaataagggaactacaattcaagaggagatgtgggtggcaacacagccaaaccatatcattctgcccctgccccctcccaaatctcatgtcctcacatttcaaaacacaatcatgcctttccaacagtcccccaaagtcttagctcattccagcattaactcaaaagtacaagtccaaagtctcatctgagacaaggcaagtcctttacagcagcactccactacttggtaccaatttactgtattagtccattctcacgctgctataaatacctgagactggttaatttataaagaaaggagacttaattgactcacagtttcacatgaagcctgaggaggcttcaggaaaattataatcacggcacaaggcaactcttcaaagggcagcaggagagagaagcgccgagcaaagagggaaaagccccttataaaaccatcagacctcatgataactcactcattatcatgagaacagcatgtgagtaactgcccccatgattcaattacctcctaccaggtccctaccatgacacatggggattatgggaactataattaaagatgaaatttgggtagggccacagccaaaccatatcaactgttggctataggaaccagaaaagtaacaggaaaagtaaaaaatgtacctaatgaactgggtggtctagcaaagcatgtaagatgttgcctggtttcttcttgctgcttataatcaaacacaaaaggagagagataagcttaagaaacgacaattaaacaaaagagggactgagacttgtcgattttgtaaatctccagcctctatagacagcaaaccatgctacagttatgagacagcttgcaagcaaacctcaaatccaggcaatagtcaggaaattatggtctaaatatcaagctgaaaaggtgactgtaaaatcctttgttcagatttctgacagatccatgcagttcctcaacagggcttctaagaagcttaaaggcattgtccctgcacaatctcatcaagaggccaaaatcagggaaacaattatctcaacaaaatgtatgagtatagattattctaatggagtaagctgcaatgagatttataggagacccacaaagtgtttttggcagaaacactaccagcattgactgcatagcacagagatgcacgaaatgaaaagagggctttggactccaaaatttctaaccacaggaagcaggctgagaaaactatctagctcaacacacaggctaccttccatgaaaaaggaagaactcagtgggcagagcaaaaaactcagagaacacagaaaggagccatgaaaaactatcctgaggtaggaatagaacttagttttaatgaagaaacttctaacatttgcttggctggattccaaaactgctatggaatagtgactcgtgcacttcctgtcttcctttttttttaaacagaactacccataatgatataattttatgcctgacccaccattgtacattggctattcggggtggtgggggtgaggtaagaaacatctcttttgtttataggtcttcagattgaaaggaactggacccaaggaacattatctctatctgaatgtaatttagaagatgacattctagattttgagctgatattgtaaagaaataatacttggggtagatgggatagtgcgtgtattttgcatgggcaaggaatgtaaataaggtgcggccagaggatagtctgagccagttttaaaacataaccataaattctttggcaattctcccctcaaaaggtggagcctcattcctattgccttgagtgcaggccagacctagtgacttgtttttttttttttaattgaggtgaacttcatatacaaaaaattaaccattttaaagtatacaaatcagtggcacttagtacattcacaatgtgcaaccatctcctctatctagtatcacagcattttcatcacctcaaaagaaaacactgtacccattaaggagttgctctccatccttccttctttcccacaccctgcacaccacaactgggccctgtcctggtctctggtaaccaacaacaatttgcctataattcaattgtaagttgtaagagttctctatacagtttgcttttttttttttcttttaaacagatggggtctcattatgttgcccaggctagtcttgaattcctgggctcgggcgatccacccgtctcagcctcccaaagtgctggtattacaggcatgagccaccgcacccagcttctatacattttggatactagacccttatcagaagcataatttgtaaatattttctctcattctacaggctgtcttttcacttcttgataatttattctcttatgcacaaaaatgtttaattttgatgaagttcagtttatcttttttgttatttctgctttagtatcattctctaagaattcactgacaaatccaaagtcatgaagaataaccctatgtttttttataagagttttaaagttttagctcttacatgtagggtgttgatccagccaatcagatcttatactaaaaggctgctgtatttgataaaacataggggtctaacttcattcttttacatgtggctatccagctatcccagtaccatttgttgaagagattgttcttttcccattaaatggtcttagcaactctgttaaaaatcagttggccatagatttatgggtttatttccagactttctattctattcccttggtctacatacctatccttatgctagtactacactgatttgatcactgcagtttcatattaagttttgaaaacagaagtgtgagtcttctaacatggttcttcttttttgatatgttttggctatttggggccccctgcaattacatatgaatttgagaactgacttttcctcttctgcaaaaaatgacctgaaatttggaaatagatctttaaaatctgtgaattgatttgaggagtactgccatcttcacaatataatgtcttctaatctctgaacacaagatgtctttctattgatttaggtcttttagcaatgttttgtacttttcactgtacaagttttttaactccacggttaaatttatattttaggtatttcattcttttggatgctattataaatggcattgtttgcttaatttcctttttacatttttcattgctggtgcctagaaatacaactgagttttgtggttgatgctgtaccctgaaactttgccaaatttatttactagctctagcagatttagatggttgacagataacaaacaggaagttgctctagctcatggggggctgaaacaaaggtatctgcaccagtccctcagggaaccaccagacaggtcaaaatgaaaactacaattttttttcagaacaaggatcttattgtccccgtcctggcaccagtgagctacaccgggaatatgggttgctggccccatagctgctgctgagctagaaaataaaggatattaggtatataagcaaaaatgtcataatgctttcttatcaaaatctggcactcccctggatgctgttaagttttctatcagattccagagttatgcaaaagttgatttgtcagttttttccagtttaacatagttgcttctgtggaggtaactgattcttagagctccttgctccaccactcacttgcttttaaaaactgggccgggcgcagtggctcatgcctgtaatcccagcactttgggaggccgaggtgggtggaacacccaaagtcaggagttcaagactagcctgaccaatatgatgaaacctggtctctactaaaaatacaaaaattagccgggtatagtggcatgagtctgcagtcccagctactcaggaggctgaggcaggagaattgcttgaacccaggagatggaggttgcagtaagccaagatcatgccactgcaatccagcctgggcaacagaacgagactcggtctcaaaaacaaaataaaataaaaataaataaatagaatgtggcagaagtgacagtatttaactcctgagactacaacataaaagacagtgagaggtcctctttgttctctctcttggaccactcactctgagagcccctgaatgagccatcctggaagtgaatcctccagcccttgtcaagccttcagatgactgcagctctgatgaacacttagattgcaatctcataagaaaccctgagaatgaatcacgtaactaagaccctcctgaaatagcaatctacaaataccatgataataaatgtgtgttgttttaaggtgctatgttttgggggtacatgatatttaaagctgagactcaaaagaaaagaacctagccactccaagagttctaagaaaaagagtgtttcaagtaccgggtatagcacatgcaaaggccctgagtaaggaaagatcttaagcatgttaaaaaaaaaattaaaaatctgaaagactagtgtgacttaagctcagcgaaggaaagaaaaatagtgaagaaagagacccccaaaggggcagaaagaaaccaaaattactataacaaagtcttaaaaagtagtaaaaactgataatatatgataaagtgcctttgaaaccacaagaaacaactacaaaaatttaacatttagaaacattaactggagagaaatctgaaactaaatgtatctatcatcacacaggaatccagggtaggaaatatgaaaccccctgagagcaagaaccaagggtctttacatctcccatatcacctactcatctttgtagaattaatgcacaatgacaaacctgaaaaaaataccttttgaagacactatttaaaattctaagtaatgaattcattggtgaaagattttaagtctagaatacaggcttcaagtatctcctcactaggtagtccatgacaacggccaaataaataactcatgtagctgcatatctaaagaacatgattataaatcagctctacaaagatgcacatttctccttgtcctgggctaccatgtgataaaaggttttataattggtaaaaagagtaaaagaatttcaaaagaattcccaactggataaccagtctctgaaattaaaactgaatttaatttagcaaaataattccatttgtatacagaaactgtaagatttttaaaatgaacttttatgggagaacatactgttacgaaatacattttcaatcagtaaaacataaaataatacatgtgttttcagattttatgactatttgaataccaagggttattctcctctatatctttatccagaaaaaaatatataacttgaaacacaaaggcaaaaaataattagcaaggtatagaagcactagacactacaaaccaggtgcagtggctcacacctgtaatcccagcattatgggaagttgaggtgggtagattacttgaggtcaggagtttgagaccagcctggccaaaatggtgaaaccccatctctattaaaaatacaaaaattagccaggcatggtagtgtgcgcctgtagtcccagatactcatgaggctgaggcaggagaatcgcttgaacccgggaggtggaggttgcagtgagccaagatcgtgccactgtactcccgcccaggtaacacagtgagactctgtttcaaaaaaaaaagtattagacactacaaaatgtggtaaataaatacaattattttatttcgttatttaaatgtagtaacatcaatataaagtaaaaggaattaatagctagtttaatatgctaggcctttttatgtcccacctgcaactcctgctatggtacgttttatctacagcatagctggtgaccagttaaaagaaaattccagaagatatgacacaaaactgtataaattcaagacaatatttatttaacaaacccagagttagtatcaactagatactaggtactgtggaagttcatcctatcaacattacattccactaatcactaattcttaagacatcagaaaaagatagcaaacatataaggcaaaccaaatatattttgagattcaatgaaaaaacatatcttacttgtatagtaaaacagtaagtgcttttaatatattttaacagaattacagacaaataactcagaagaaaaaaatcaactttttgaagataattacaaaccgaattttcttcttcctcttccaattctcgttgctgttcctcatgtcttttagctttgatctccatagcttctgtgatcaggtctcttaatattgatacaggtttggcattcttgataaaaggatgctaaaaaagtaaaattcaatggtataaattcaaaagatttttccgaattatagctaacaaatgttaaaacaacatgtaaatgttaaccaggatcacaggcttcaatgattgttttttcatctagaattaaatgtataggttaagaaaagagagtatggccactgcctagaaataaagaatttgctttggggcttgtttaaaaaaaaaacttaaagcacacatgcaaaaatgcaaccctgttaataaaactataatatccttaaagatctaattgtccaaaggaagtgtacattaggagtaaaaaagattaagttaaaaataggattacagattatattacacatagaaataaacttattttggtactgagttacgtaatttaattaatcttaataagttgacagccaaaatcagtggccaaaaggagagcaactattttgttacttctttaacatattttctattttattgtatcttaagtaatttaaccaagacaaaaatattttttcagaaaatgaatgttgcctaatttctttactatatataaaataacttgtcactttttaaaaaatatcaccctgatctagctaaaatagctaagctctctatcattctgacaaagagaaggaaaactatcagaatagacctaggttttgaatttctttttattgagaaggagggacatgagagaaagtagagtgaaaggttataattttggatagataacctaaatttggggcagcaatcagtttcagtaattttcatagttacatgtcagtagatagcatcaggtaaaagtgacctgactgagtgagtgagttatttgtttatttgtttgtttgagacaggggcttgctctgttgcccagatgcgagcacaatggtgcaatcatggctcactatagtcttgacctcctgggctcaagtgatcctcccacctcagccttcctaagtgctgggaatagaggcatgagccactgcacccagccctgagttattttaataaacttcaagagaacacaaaaatatatttaaagacaaaaaaaattgtgctgaagaagaaatagatacttgaaagagggtttaaaatggcaaacatatcatttgggacaactataagaaagaactttttcagagtacagaaatactaaaatcaattgtaaagaaccaataaattattttagaacagttatagattaatcttaccaaacaaattaagtcctattaacatatctgtggtagagactcctggtcatacaccaaaaatagagttgtggttggaccgacaattgcccaactggatcctacgtttctcaacttaacccattcaggtggttatatgcgactaagtgaatgcgggagcaaatactgtgttccacttcctggcctgggctatggagggctccttgttactaatggataagggtgagaggtcaggttctcccagagtcctgtactggtactgtgggaagtagtctcattttagctgattggcgatgaaagtcctgacccttcaccagactgcctctgaccccactccaacagggaggttgttgggttcttattcctgcctggtaggagtataagtctaggctcccacatggtcttcactggcactccccacttagggagggaatactttctacactgccttgtggagatgaatgccttagcatgacagccttctctgacaccgcctgagaaggactggacagcctcaaaaggatagaagtctaggttctccatttagcctttgctggtgaccggggtaggccatagttttcttggtggtgtttggctagagtagaacggttatcatctgaaagttttcagtcttactaggctgtccatttctccgtccttctgcttgaaagagcaggtttttatttctagtttgtgtccaatgttgtttctgggttgttggcttctccactacccagtgtgggataaatgagggaaaaagaaaccccagggaactcacagctatgtctttccttgagtcccaccatctctagcagtctattgccttctttccaccttttagagtctttttatgcttgttttatatacttacaatgtccatggttttagctgtactttaatgaggaagtatagagaaaaatatggttactcaatctgtccagcggcagaaatgccttcttcaactcactttaagcacttgttttatctgaagtgtttttgtataaatcattaattttgaacactatcagtttagaaattgataattcagaacatgaacaaaatttaagaggaaatatttcagattttaaaagaataaacttttcaagcagtctcaatttttaaaatacatcatcaagaatgtgataggttgatctgcagtaatttctgtcttctcattactttaggtggtttaagaatcctcaccctctttaatttttattttagacacatttagaaataggaaaactttactgcctattagaatctggtacattcatctttttcttgttgaaatactttataaaacccttcatataatcagccccttgcctgacataaatatatatatatattttttagtttccgttttttgccattcatgcattttttaagttatatgtattcaaatcatccatttttcttttgctttattgcaccggaatgaatatataaatattctcctatattaacccctagttctttcctatttccattttttgttttagtttttttaacatttaagaccttaatctatctggaaattactttggtgtttctgtggtgaagatctaagttaatcctcccaacaccccctaaaggcaggcagttatctcagcaccatttttactttgtttttccctcactgattagaaatgctatcttcataatatgctagtttcctttgtatattatataccatttgtgggcatttaattctgcttcattattctatctcatactggcgttacatacttttctaagcatttaacaaaaagatgtaatttgtttattaaacataaaatttgatttttctattaaatcaatcactatataattcagatgatgtttattttttgcctatatggttactcagtgactgaaaacggaatatcaaaatatcccaatttatttatttagagcaacctcttatgtctttaatttgtaacatacaatgctatattaatatatcaagtttataactatatcttcctttatattatgttctttatcaatattaagtgactccatcctcatttactgatttctgctgtcaattttgcttttttgatcatgttattcatactatctttttatattttattaaaatttcattgcctgtttttaacttttttttttaaataaaaacagacaattgaaacatttttattaggttaatttcactttttacattactacaacaataacaaaaataccaataccattgaatacaattaagaagtttacttaaatcatattcctcaaaatttggtgtgtatcatcacatgtgttagaatcatgggagcgagggcagagggttacttctaaatattcaaattctcggcctcccctagacaaactgaatcagaatttctaagaatgttgccatagaatctgcattttagcatttctttccaagtgatttttatgcaaaccaaaattaaaaatactgcattgacattttccatcccagtcttctgaagattgaaagttaacagcagggttggggtgggctggggtgggacaaggtcatgggaaatagcagcccaggaagcatcagcactgtcatcctcactgtggtttggatgaagtaccttttcaataagctcttctgtatctcttgataaacagttacatggtaatgaaacttttcaaggttatttccttgagaatacagctaaggcagcttcttgcgtctttccaagcagaatattctgatattattattaatctttatcttgtcttgttctgaaaacaatttgagctatcttatgaaattcatagtctatattagtttaagaagtagatgagaaaataagctcaggaaaataaacctatgggtaagagagagagtgtatgtgtgtgtgtgtgtgtgtgtgtgtgtgtaagagagacagagagaagaaagagagagaaggtaacttagagattaataaatacttcttttaaaaataggagttatttgtattttagtttttaattcaacctaaaccttctctctgtagggtttcacaattttaaaaaagtatgtcttttaatttaacaaaatgcaaacatgtatctctgctagtggagaaggtagtgaaaatctttttttttttaaagtttttttttcttttattattatactttaagttttagggtacatgtgcacattgtgcaggttagttacatatctatacatgtgccatgctggtgcgctgcacccactaacttgtcatctagcattaggtatatctcctaatgctatccctcccccttccccccaccccacaacagtccccagagtgtgatgttccccttcctgtgtccatgtgatctcattgttcaattcccacctatgagtgagaatatacggtgtttggttttttgttcttgcgatagtttactgagaatgatgatttccaatttcatccatgttcctacaaaggacatgaactcatcattttttatggctgcatagtattccatggcatatatgtgccacattttcttaatccagtctatcatttttggacatgtgggttggttccaagtctttgctattgtgaataatgccgcaataaacatacgtgtgcatgtgtctttatagcagcatgatttatagtcctttgggtatatacccagtaatgggatggctgggtcaaatggtatttctagttctagatccctgaggaatcgccacactgacttccacaatggttgaactagttcacagtcccaccaacagtgtaaaagtgttcctatttctccacatcctctccagcacctgttgtttcctgactttttaatgattgccattctaactggtgtgagatggtatctcattgtggttttgatttgcatttctctgatggccagtgatgatgagcattttttcatgtgttttttagctgcataaatgtcttcttttgagaagtgtctgttcatgtccttcgcccactttttgatggggttgtttttttcttgtaaatttgtttgagttcattgtagattctggatattagccctttgtcagatgagtaggttgcgaaaattttctcccattctgtaggttgcctgttcactctgatggtagtttcttttgctgtgcagaagctctttagtttaattagatcccatttgtcaattttggcttttgttgccattgcttttggtgttttagacatgaaggccttgcccatgcctatgtcctgaatggtaatgcctaggttttcttctagggtttttatggttttaggtctaacgtttaagtctttaatccatcttgaattaatttttgtataaggtgtaaggaagggatccagtttcagccttctacatatgactagccaattttcccagcaccatttattaaatagggaatcctttccccattgcttgtttttctcaggtttgtcaaagatcagatagttgtagatatgcggcattatttctaagggctctgttctgttccattgatctatatctctgttttggtaccagtaccatgctgttttggttactgtagccttgtagtatagtttgaagtcaggtagtgtgatgcctccagctttgttcttttggcttaggattgacttggcgatgcgggctcttttttggttccatatgaactttaaagtagttttttccaattctgtgaagaaagtcattggtagcttgatggggatggcattgaatctgtaaattaccttgggcagtatggcctttttcacgatattgattcttcctacccatgagcatggaatgttcttccatttgtttgtatcctcttctattttcttgagcaggggtttgtagttctccttgaagaggtccttcacatcccttgtaagttggattcctaggtattttattctctttgaagcaattgtgaatgggagttcactcatgatttggctctctgtttgtctgttgttggtgtataagaatgcttgtgatttttgcacattgattttgtatcctgaaactttgctgaagttgcttatcagcttaaggagattttgggctaagacaatggggttttctagatatacaatcatgtcatcagcagacagggacaatttgacttcctctttttctaattgaatacccttgatttacttctcctgcctgattgccctggccagaacttccaacactatgttgaataggagtggtgagagagggcatccctgtcttgtgccagttttcaaagggaatgcttccagtttttgcccattcagtatgatattggctgtgggtttgtcatagatagctcttattattttgaaatatatcccatcaatacctaatttattgagagtttttagcatgaagggtggttgaattttgtcaaaggccttttctgcatctaatgagataatcatgtggtttttgtctttggctctgtttatatgctggattacatttattgatttgcatatattgaaccagccttgcatcccagggatgaagcccacttgatcatggtggataagctttttgatgtgctgctggattcggtttgccagtattttattgaggatttttgcatcaatgttcatcaaggatattggtctaaaattctcttttttggttgtgtctctgcccggctttggtatcagaatgatgctggcctcataaaatgagttagggaggattccctctttttctattgattggaatagtttcagaaggaatggtaccagttcctccttgtacctctggtagaattaggctgtgaatctgtctggtcctggactctttttggttggtaagctattgattattgccacaatttcagatcctgttattggtctattcagagattcaacttcttcctggtttagtcctgggagagtgtatgtgtcgaggaatttatccatttcttctagattttctagtttatttgcgtagaggtgtttgtagtattctcggatggtagtttgtatttctgtgggatcggtgttgatatcccctttatcattttttattgcatctatttgattcttctctctttttttctttattagtcttgctagcggtctatcaattttgttgatcctttcaaaaaaccagctcctggattcgttaattttttgaagggttttttgtgtctctgtttccttcagttctgctctgattttagttatttcttgccttctgctagcttttgaatgtgtttgctctggcttttctagttcttttaattgtgatgttagggtgtcaattttggatctttcctgctttctcttgtgggcatttagcgctataaatttccctctacacactgctttgaatgcgtcccagagattctggtatgttgtgtctttgttctcattggtttcaaagaacatctttatttctgccttcatttcgttatgtacccagtagtcattcaggagcaggttgttcagtttccatgtagttgagtggttttgagtgagattcttaatcctgagttctagtttgattgcattgtggtctgagagatagtttgttataatttctgttcttttacatttgctgaggagagatttacttcaaagtatgtggtcaattttggaataggagtggtgtggtgctgaaaaaaatgtatattctgttgatttgggatggagagttctgtagatgtctattagttccgcttggtgcagagctgagttcaattcctgggtatccttgttgactttctgtctcgttgatctgtctaatgttgacagtggggtgttaaagtctcccattattaatgtgtgggagtctaagtctctttgtaggtctctaaggacttgctttatgaatctgggtgctcctgtgttgggtgcatatatatttagtatagttagctcttcttgttgaattgatccctttaccattatgtaatggccttctttgtctcttttgatctttgttggtttaaagtctgttttatcagagactaggattgcaacccctgcctttttttgttttccatttgcttggtagattttcctccatccttgtatttttagcctatgtgtgtctctgcacgtgagatgggtttcctcaatacagcacactgatgggtcttgactctttatccaatttgccagtctgtgtgttttaattggagcatttggtccatttacatttaaagttaatattgttatgtgtgaatttgatcctgtcatgatgatgttagctggttattttgctcgttagttgatgcagtttcttcctagtctcgatggtctttacactttggcatgattttgcagcggctggtgccggttgttcctttccatttttagcgcttccttcaggagctcttttagggcaggcctggtggtgacaaaatctctcagcatttgcttgtctgtaaaggattttatttctccttcacttatgaagcttagtttggctggatatgaaattctgggttgaaaattcttttctttaagaatgttgaatattggcccccactctcttctggcttgtagggtttctgctgagagatccgctgttagtctgatgggcttccctttgagggtaacccgacctttctctctggctgcccttaacattttttccttcatttcaactttggtgaatctgacaattatgtgtcttggagttgctttctcgaggagtatctttatggcgttctctgtatttcctgaatctgaacgttggcctgccttgctagattggggaagttctcctggataatatcctgcagagtgttttccaacttggttccattctccccatcactttcaggtacaccaattagacgtagatttggtcttttcacatagtcccatatttcttggaggctttgctcatttccttttattcttttttctctaaacttcccttctcgcttcatttcactcatttcatcttccattgctgataccctttcttccagttgatcgcatcggctcctgaggcttctgcattcttcacgtagttctcgagccttggttttcagctccatcagctcctttaagcacttctctgtattggttattctagttatacattcttctaaatttttttcaaagttttcaacttctttgcctttggtttgaatgtcctcccatagctcagagtaatttgatcgtctgaagccttcttctctcagctcgtcaaagtcattctccatccagctttgttccgttgctggtgaggaactgcattcctttggaggaggagaggcactctgctttttagagtttccagtttttctgttctgttttttccccatctttgtggttttatctacttttggtctttgatgatggtgatgaacagatgggtttttggtgtggatgtcctttctgtttgttagttttccttctaacagacaggaccctcagttgcaggtctgttggagtaacctgccgtgtgaggtgtcagtgtgcccctgttggagggtgcctcccagttaggctgcccgggggtcaggggtcatgcacccacttaaggaggcagtctgccccttctcagatctccagctgcatactgggagaaccactgctctcttcaaagctgtcagacagggacatttaagtctgcagaggttactgctgtctttttgtttgtctgtgccctgcccccagaggtggagcctacagatgcaggcaggccttcttgagctgtggtgggctccacccagttcgagcttcctggctgctttgtctacttaagcaagcctgggcaatggcgggcgcccctcccccagcctagctgctgccttgcagtttgatctcagactgctgtgctagcaatcagcgagactccgtgggcataggaccctctgagccaggtgcgggatataatctcgtggtgcaccattttttaagcccgtcggaaaagtgcagtattagggtgggagtggcctgattttccaggtgccgtccgtcactcctttctttgactaggaaagggaaccccctgaccccttgcacttcccgagtgaggcaatgcctcgccctgcttcggctcgcacacggtgcacgcacccactgacctgcgcccactgtctggcactccctagtgagatgaaccgggtacctcagatggaaatgcagaaatcacctgtcttctgcggcgctcatgctgggagctgtagaccggagctgttcctattcggccatcttggctcctccgaaaatcttctcttgagaaaagtgaatggacaaataaagatttctcatttccgacaaaagaaaataaccagcattgatttgctatttctgttgttatgagtgcttccaggtggttgtctttggatctgctctgttcctgtgcacctcttcttggaatataaatttctgagcctcaatgtgccctgatgccgttcctttcttccaccgtaagagttaccgaaagctcggcgtccgtgatggggtagagggcttccgaggcgatcgggcagtgtcagtcttcagccgctaagccgagaagatctgggaaggagtcagagagccttgggccagagttccaggggctctgggagtggcggatttgaaattggtgagatgtatcttgggctggtcggtctgaggacctgaggtcctaggtggatctttctcaaggagcaaaaagcaggaggacgggggattgatctcccaagggaggccccccgatccaagtcacagcaccaaatttcatgcacgtccgtgtgaagagaccactaaacagctgtttttaacttttaacccaaattcttttaagtatgcctcatgtagaaacatgagttggattttatgtaagtttgtaagtttatctcatgtagaaagcatggagttgcatttatcttatgaactaagtgaaccatttagtacttaactaaatattatttaaaaaaattaaccacttatgttagtatataattatatgctaatgccattttatcacaattgttttacattatgtaaaacatacatgttttatcataatattctatcataaatgttttacatttgccatcttgttttttctgcattcttttttacgttgctttgcagttttaattttaccacctgctaatcttaaaatgcctttaaaaatatacagatagtccctgacttacaaaggttcaatttaggatttttcaactttacaatgctgcaaaagtgatatgcattcagtaggaaccatacttggaattctgatatttgatattttcccaggctagtaatatgtggtacaatactctcttctgatgctgagcatggaggtattaataagtcccagctcccagtgagctatgcgatcatgagggtaattaaccaatattctatagtgtactgtgttgtcagcattttttggatattgtgttttgtgttttcacattcaattgcgtctacaaaacactcaactacactaatgtatgtgttctgggcacgtttttggtaggctaggctaagctaggataggtgtattttaacacctttttgacttacaatattttaaaccttcattggggtttatcaggacctaactccattgtaagttaaggagcacttgtacttaaaaacttggcaatttgtctgataaaacttctcttctgactcaagaatactcaaataatatggtcttgctcttcatgtacccttttaactttattagccagttcctctttgttgatcaaaaccatgtctgcagcagttatgtagggaaagcatgagtacaaatgaaattggacataccgagattttgagattaagaatgttaagctctatagactaactgtagcataacactatagtgaattgacaatgaattgcataaaagcagggttgtggtaaattggacgaaccagataagtatattggcttttcttaaaaataactgcagcttagaagggtagtttatacattcccctgagaagataaagtataatgtagtttgaattttctatactttgttaaagaaatataattctactggtttctagtttctgtagtgttggtcttctctcacttctgttaatacataatcagtcactaaatccttctcattctttcatcagatttactattttctattttggcaactatttttttaaactcaggtccttaacaattcacacctgtattattacagtgcctcctcattctatttctatactttgttgcaatattatgttatcaaagacattcttttcttacattctcttgtttacatatgtaagtaaggtggctctcagacaaaattgaggcatctcatcctaggcatcagaatacccttcttgcttcactgttgtctgtatctaaactcagacaccacttctctaactggtgtttctattctggctaagcagatcttactgtgttctaaaatacatctcccatttttgtgtctttgttcatattgttcataccatttctcctccctaaaatgatctgcttcttctgtatgaggtatctgtgattaccatatccattcttctacttttacatttcttaatcatataggctgtgcatcatgaatgtaacttctacattgtattataattttttaacatttttgtctttcatttctcaaagaatataacttcagttttttgtgtgtttttggggtgtgtgtgtgacctttctactagtttgtcaaaaatgtttagagtaggacaggagtcttttctttcttattgctctacactcctctaggacactgtctttgtctttacagttgtttgaagttgtgttgtaagtacctctgttttccaacttgataaaaagggaagagatcatggaagactgctcactgacttactttatttatttatttatttatttatttatttatttatttatttattttgagacagagtctcactctgttgtccaggctggagtgcagtggtgcgatcttggctcattgtaatccctgtctcccgggttcaagtgattctcttgcctcagcctcccaaatagctgggactacagacgtgcaccaccatgtctggctaatttttgtatttttcgtatagacggggtttcactatgttggccaggctggtcttgaactcctgatctcaagtgatccacctgcctcggcctcccaaagtgctgggattacaggcgtgagccacggtgcctggccacttactgactttagaatctcggctgcccaccagcaggtataaggatcatcttcagatcaggaactccggtgctaatagactgaaactgaaccttgtcttttaacatctccagggttttaatttatctttaaaaactactaaaatttcaatttaataatctcaaaggatccttcccttctatgatttttaaaaatgtatacaataatctatctgtgtcatagaaaatcaatcactattttaaaaatccatcaggaatttctttttaaatattgtttctttgtttactggaaatgaatatggtataatctgtacacgtaagctatagatatatgtcaactaaaatttggtaatcagattgtccactgagagttaaactatgatttaaattaggggtccccaacctccagctgcagactggtacctgccttggcctgttatgaactgggctgcacagcaggaggtgagtgagcattacagcctgaactctgcctactgtcagatcagcagtggtattagattctaacaggagcacaaaccctattgtgacctgcacatgtgagggatccaagttgcatgctccttatgagaatctaactaatgcctaatgatctgaggcaggacagtttaatcctgaaacaatcccaactctgctcaccatccatggaaaaactgtcttccatgaaaccagtccctggtgccaaaaaggttggggacaactaatttaaatcataacagataagacatacaaaactccttgaagagacagaatggttcctaggcttcctgctaaataagactctaatgaggccaaagataattatcctacccccccaaaaaaaaatttaaatcagaagtttgttaggttaaatacacacatattaactttaatatgtacaagtactggatactaggagtccaaaggtagtaccctttggactactttaaaatacatatatatttcagcagggcgagatagctcacgcctataatcccaggaatttgggaggccaaagtgggcagattacttgagcccaggagttcgagactagcctgggtaacatggcgaatcctgtctctacgaaacagacaaaagttagctggatgtggtggcatgcatctgtagtcccagctactcaggaggctgaggtgggaggataggtggagcccaggaggtagaggtttcagtgagcgagatcatgccactgcactccagcgggggcaatacagtgagaccctatctcaaaaaatacatgggccgggcacggtggctcatgtctgtaatcccagcactttgggaggctgaggcaggcggatcacttgaggtcaggagtttgataccagcctgatcaacatggcgaaactctgtctctactaataatacaaaaattagccaggcatggtggcacacacctgtaatcccagctacttgggaggctaaggcacgagaatcacttgaaaccaagaggcagaggttgcagtgagccaggtgccactgcactctagcctgggtgacagagtgagataccatctcaaaaaaataaaaaataaaataaaatatatacacacacatataatatacatatataacacatacatatatatttcaaatgaatattgacaatatttcaaaataaatgttttaatcaatttttgtggaaaaataaaattttaccatcttaaccattactttttgaaaggtagtatttgcacataacccaaatcgcaaaagtctcataaacagttttcatcaaaaagcaagtctccatcccagtcctgccccatccatagttagttaccttttctggaggccagtttcttgcttatttttccagagatacttcattataagcattaagatatgtatatatgttgtgtgtacataggtgtatttttccagtaactctttttcttgtactttaaattgtttccaacttgttgacagacatttaggatctttccaatcttttacaatttcaatgttctacgaatatttttacacatgttatttcacacatggttaaatatttctgtagaataaattcctagaagtgcaactgttggatcaaagaatatatggatttttattttaaatagatattgctgtactggcatctatggagattgagtaccaagttacactttcataacaataaacattatacttaagagcctgttttccatacccctcaatacatccttttggaaaaatgggactttggaaagttacttttttttttttttccttttttctttttttgttcttttaacccaatggttcctttagagacagggaagtccctttttacaagaaccatgtttttcatccttttgtcacttaacaatagaaatcatttagcaaatatcaagttttgttaatgtgagacatacttattattagctgaaagttctaagactattctgttggggaaattaagattcacaaacacctattataaatattaaattatttctatttgcattaaattttaaggtagattttaaaatctactgacattctggatacaaagtctacttacaattattctatcaaaaaaaattgaaactctgaagctcttcatttagataatcctgtaactgatatttacaacgtgataatctcttcaaggagtccagggatcttgtacttacatattttatggtggagcaaaaagtcaaaggataaatgctgagtcaaggaacagaagaaaaaaaaaacatgagaaatagtaactatgaagacaaagattcctttctgaaaggagaatgctttggaaattttgttttaaaatgactctgggggaaatgaggggacgagaggggaggaaagaaaagaagggagcaaacaggaggggaggggaggtttacatctttagaaatcagttatgaaacacacagcaattctggccaatgtcagaaagctgaaaggtatgaagaaaatatccttcccttcgaggcacaagcactgacctgtaaaagttgtgttgcagtagctctctgctcaggattcttcaccaaacactttttaacaaaatcggtgaaatcatcggaccaaagttctggctttctgaatgttggtggtggatttgtgggaatcataaaaatagcctagtacaaatgaaatatccaaaagacagtaagaatcacactagcacaatcaaataaacaaatctctttatctgtctttttatcagactctaaatttgaaaaacaaatttaagctgttctaggatttctagtaacactgaaattcaggaagccagtccatctgctactaatgtaatcatttcccattaaatttcctctatttgaattgtagctcattgagcacatcattctttattttacctattacttttttttatcagtctctaaagaagactatatttctgacccactaaggactttccctaaacatatatattcccaaattttgctactacatgccagatttacttcttgtttcagttttatataagcattgctgcttaaaatgggtagtaggagtccaatttgcttttgcaatccagaatatttaagtaaaattactgctataatttgaaataatacttgacagagccaagacttttctctttttaaatatgagtcaaaatttcaaatgaaaaatttcaaaggtaatatactactttaatttattactaatgattgagtacttataatttagtggtaatgataatacattcagaaacctcaaaaatcaaaagccataaaaagagtccatctcatctctcgcctcctagatagtcaccctggcctgtttttgcttttaatctgagtatgtttatgacccaagaagtagattaaaaaaacaaaaacaaaaacctgaagacattctaaatatgaaatacaagtcagttagggggttaatgtagatgtcccaacatgagtaataaaatgttcaaactagaatagtatctacaggaatgaaatggaagaaatgaagcatgagatacttcaaaggaggaaccaagagtacatgctaataatattgttttggagaggtgaaaaaaggaagcatgaaaaattactccagaattcaagaaataagaaataggtaccttaaattgcaaggcactcaggtattttaataattgcctatatcattcttttgaatgccctcagaatatgcagccatttaatataatgcattatcattggtttcttacttggaaagtgatcaaatggactttctgtggacacagcagcaaagactcaatatccaagtctgttgattataggttaagagtcaatctttttaccagtatatgcatcttctttcaaaaaacgtaaattctttaatagattagaatattttatatacctcacgtcatgttatacatattacatctatgatagtctttcaaaagcagtgtagccagtattacaaaacaataaacatctttcaatcaaacaaatatttataaagcatttctgtgtgttcagaacaatgctataatttagaggtatcaaaacaaagggccacaggccaaatagtgccagtggacctacttcgttcagacaaaatcaatctcacattgccacaagatgaatctgctgtaattagactaatttaaactaggacatatgttcttccttttgcgtgagctctatctagcctggctcaattatctactttatgtgatggtccctttaaatatcagaccttataaacccggctattacagtttttaaaataggatacatatctcagacccccagagctcacagtcaacttgtgcagaaaaaaaaaaaaacacatatgaaacgaatagcaaacaactgagtgccagacaatgaaattctgcctgcaaataacctaattaatctcagacagctccacagttgaggcagaacctaataaggctttaaaaaatgagtaaaatggggttaaaagcagctgctggaaaaggcacacaaaaccacctgctacttccaactagagaataaaaataaatttgaactctcatctctgtgaaacagttcaaaggacttacataagcccctatatagactgacctcaaactgcaggtaaattatactagattgtctagataaatattgttcatctgcacttctgttgtaaactggtggataacacaatgatttatgtccttgaagccaatgctctcctttgaactttgaggcaatgagttgcagtcttatcttgagataatcttaacatataaggctcaccttagcagtagctattagaaacccaaggataaaaagcttaactctaactcttatttacccagtactctcataaagtgaacctaaaatgtcacattctaccctcaaatatgcattgaacaagcatgaacaccgagcatacagtccaaacaaataagtcttagcgtatgatctacaccaaaatgtctccaggaaaaccactatgccatttatttccattttttaaggttagctcatcaataatagattttcttgacagccttactgtactaatttaactaatttaacctaataatgaaccacagaggatcctcttaagaatctctaggttttatatgagttgattaggtattaggccccttctatagaaagttttggcaatcagtggctcactttagactaacaattcattcccttgccaccaaccaaatcacagggacacacattacagccatataatttatcttatctctaacaccattttgattgaagaatgttagtaaaataaatgacatgattatccttgtgtttgtttctacacaatgtgttgcttaactacataccaaacctctgattatgtttctaaaagaactactctgatcacaagcagtttaataacgcaagaaatctaggtgcttcaaaacaactaattatcttcatgcctgaaatgtcatgccttagactgcaagagtacccaggagatgtggaaagggctgaaaatgagaatcaacaatgactgaactttataatctcagtggaatgagtcaacacatgtctgactctacagcagctgagtctgtgaatgtatagaagtgatgggcatgccagaataacaaagaaattcatgctattatttaagaacctcagatatatgagcaaaaggttatcttcacaacaaataaatgagataaaggatgagaaaacactataaaactataaagaagtaaacaaatatagctgtttcctgatagcaaacataatacacaggtaacaagctaaataaaattttaaaataatttctggaaaggaaataaagtaattacactaatttataaaagacagtacaaataaaagcaaacagtacaatgtgatgaggccaatactggacatgagtcagaaaaactggcttgagttctaaatcactacctgactgtgtggctttagtatcattttgttttttttttccaagtaaggaggttgaactggatgtttatcaggtcccgtactgggtataaaaagaccctggcactctttaccacgtattaaaaaaccctggcactctaactgcctagcaattgaagggtaaaattatactaaacaagtattaaattgctagttaggaaagggatggagaagaggaaaaagagggaaggacaggaaaaggccttttagatgttaatataaaaatgtgaatctaggccaggtgcagtgactcatgcctgtaatcccaacactttgaggggctgaggcaggtggatcacctgaggccaggagttcgagaccagcctggccaatatggtgaaaccctgtctctcccaaaaaacaaaaattagccaggcatggtggcaggcacttgtaatcccagctactagggtggctgaggcagaattgcttgaacctgggagatggaggttacaacgagccaagatcacgccattgcactacagcctgggcaacaagagggaaactccatctaaaaaagaaaaaaaatgtgaatctaaatttttatcaccattccctcaaaagcaaatatgaaatatacagaaattttgaagagaatagtaaatctaaagtgaaactttctcctataataaagtttccacagtaagcacagagttaaagtattgggaacatgaactcacaattcactccagttccagtagcaatcattaatctggccaagaaaggccaatgtgccagcctggaaaccaaattaagggagagggtgcagctggtattctggaagtacaaagcaaataagagaaccagctctagatggcactgggtacataacagcaccattattagtaactatctgacctatttaactactctatgcctctgttcccatatcttaatatgggaatgttagggctgttctgaattttaaatagattaatacatgtaaaacacttagaatagtgcctggcacaattgtaaatgctcaataatgtgagctattattaacctaattttacgactgaggctcacaagagtaagctagcttattcaagatcacacagctagtaaagtgaatgtcaaaattagaacaagtttgattccttagcatatgctacctcacattaccactgcttccatcagatttctgctgcacataattttattttaagataaaggctctgttatatacattcagtctctagaaaaaagtggaaaagtatttgtaacaaagaagattatagttttactgtctctaacggtggaaaactgaagaaaaaaaaagtcaaacaattgagggtgctaagtaaactatatatgaataacataaagtaacatattgccataaaaactgacaaatgtgtgaattacaaaaccacaaagaaaagttcttaaaaagcaaaaatgagggagtaaaacagtaaagactgctttcacataaaaatgactagtatgcagcaataaaaactaaaagatggtatagaatcttaaaaatttaaactgtcaattcatagcagcaattatgtacaagattgtataagtgtctttaaaatttatttttactatgatggtttttaaatttttttttacttttaaaaattatacttgcagctaggcatagtggctcatgcctgtagtccctgagctgagaggctgaggaaggtggattgcttgagcccaggagctcaagacaagcctaggcaacacaatgagatcctgactctatttaaatatatatacatatatttaaaagtatttaaaaattatactcgcaattgcaaaagcttcatttgataccaccccttaagctgtcacctattccagtctgccccacaaccacctcttactcatgcactatttaaatcccaatacaatcaattgtaaatcttaaccatctttcaagactgaaatataatatccctttaatacaatccaacaatatcataaaacatggctgtagagaaaagcaaaagtgaacaaaagccaacacttaaagaactttatcacaaatttcactctctcagatagaagtcctatgatcagttcaactgacttttgtaagcacataaatgtatccatacctgcaatatattaacttcttcaagaaatttagagtctaatggaatataaaaatgtatatcagatcattttaataaaatagtgtaagtgctcaaatacatgtgagcaataggtattacaaaggatgacttagcccaaataggtatgtgagctaaatgggtatgggaagatgagatttcagctgagtcataaagaatgagtgagtcagtgaagcacagaaaggagaccagcatcttctcagttgtgaagtttgaaacctcatggagctgtgagagaaactgacttatttcagatgtagggcagggaaattacgaggtgagccaaaggcatcttgttgcccataaagaaagaaatcactcaaatactaactggatcacatcagaagttcagcacttgtagaacttagtatcagccataaaagagtctgatttaactgatctggggtgacgacaaggcacaatattttcttacatctcccaagcaattccaatatgtgagtaacatggagaaccactattctaaaatataaaatacaagacaagtgctatcactgtttaatatctcaacttcagaactttccatattttaatattgtactctgattagttataaactcattctaaatgccctggataacatgaaaactacctgaaggcaagacagtgtcttctattgtctgaatgtttgtgtctcttgcaaaattcttatgttcaaagcaaatcaccaacgtgatggtattagaaggtggggcctttgggaggcgattaggtcataagggctccacctttgtgaatggaattaatgccctcataaacaagtccccacagaaccatctaatcccttctgccaaataaggacacatagaaggtgccttctatgaggaacaagccctaactagacaccaaatctgctagcacctagatcttgaacttccaagcctccagaactgtgagcaatacatatcttttgtacataaattacccagtctaaggtattttgttatagcaacccaaacagactatacaatcacttaagttttatatgtcaactgcattaggcatagtacttctccatagtaaaacctaaatttatactgagagtgttgatataaagacatccagttaagtatggtaactgaacatactgatttacttcaactccttccccaaaatcctgctaaagtacagtaagaattttaaaaaggcttaacctccaaagagagaagggcaatagaaaataagagacagcaataaaattttggaaatagaaagtagatgaaagagtcataactgactcaaaagatctgagaaatcagtaagaagcacatcaattccctccaaataactaaaaaaaaaaaaaaagcctaagaacttggaagtaccaaatatatctaaagatagtggacacctgtaacaaggagcacacctggtaccaagatcttggcttctaaaatgccaatccccagtaaaagaaacctatgctccttgaggaaatgactaatttcaaaggtcaaaataggaaaatcacaaggttagctctgggtatcttgctaggccagaaggtaaggaaacactcaaagattaatggtattatgtcaaaaggacatataaataaccaaatttaggataatttgagcatcaaaataataatagtaataatgactataactgattataacaaattgaaaacaattagtctacagtgttttttttttttatttttgagatggagtctcgctgtcacccatccaggctggagtgcagtgacatgatctaggctcactgcaacttctacctcccaggttcaagcgattctcatgcctcagcctcccaagtagctgggattacaggtgcccgccaccatgcctggctatttttcacatttttagtagagacaaggtttcaccatactggccaggctaatctcaaactcctgacctcaaatgatctgcccaccttggcctcccaaagtgctgggattacaggtgtgagccaccgcacctggcctatgacaatatttttcaaagagtttaagaaaagctgttctttatagaaaaattctaaaaatacacagtaactgaaatacagtatcaacatattgcaccctcaatgtaatttaatgatcaattcaggcaaggaacaccaatggatacttgagtttggatatctgtcccctccaaatctcatgttgaaatgtggtcctcaatgctggaagcggggcctgggaaggaagggaagaaggaaaggaaggaagaaggaaaggaagaagggaagggaaggagggaaagatgatgtagagagatagaatgaataatgcccccaccccgcaagatgtctacgttctaatccccggacttgtgaatatgttactttacatggcaaaaaggattttgaagataagattaagttaaaagtcttgaggtggacagattatcctaaattatctaggcaggccaaatgtaatcagaagggtcctaaaaagtggaagagggagccaggagagtcagagggagatgtgagtttggaataatggtctgctttgaagcagtcttcaaataatgctgctttgaagataaaggaagagggccatgagccaaagaatgtgggcagcctttagaagcttgaaaaagcaaggaaacaaattctctctgagatactccaggataaaaaagcttccctgccaccacttcagatgtagcctagtgagatatgtgttagacactgtattttggaaagctccaaaataatctcctttgactccatgtcccacatccagggcacactgataaaaggcgtgggctcccaaagccttcagccactccatccctatggccctgcagggttcagcccctgaggctgctctcatgggctggcattgggtgcctatgggttttccaagtgcatagtgccagctattggtagctctatctggaggggtctggaggatggtggccctcttctcacagctccaccaggcagtactccagtgaagactctaaccccatatttccctcttgcattgccctagtagaggttctcatgaaagctacagccctacagcagacttctgcctggacattcaggcttttccatatctcctctaaaatctaggctggggttcccaagtctcaactgttgccttccttttagttatgaaaatggctgcagctggcttttgcaccctcaaataagtttttcttttctaccacatggctgggctacaaaattttcaacttttatgttctgcttcccctttaaatacaagtttgagttttacatcatttctttgctcatgcatatgggcacaggttgttagaagcagccaggtcacctcttgaacactttactgcttagaaatttcttctgccagataccctaaatcatcagtctcaagttcaaagatccacagatccccagggcaggggtaaaatgccactaggttctttgttaatgcataacaaaagtgacatttgctccagttcccagtaagttcctcatctccatccgagacctcatcagcatggatttcattgtccatatcactatcaacattttggtcacaatttaacaagtctctaagaagttccaaactttccctcattttcctgtcttcttatgagccctccatactcttccagcctctgcctgttacccactttcaaagctgcttccacattttcaggtatctttatagcaatgccctactccttggcactgattttctgtattggtctattctcacatttcaataaagaaatatctgagactgggtaatttataaagaaaagaagtttaactggctcatggttctgcaggctgtataggaagcatagcagcttctgtttcagggagacctcaggaaacttacaatcatggtggaaggtgaaggggaagcaagcacaccttttttttttttttttttttgaggcagagtttcactcttgtcacccaagctggagtgcagcggcatgatctcggctcactgcaacatccgcctgcccatttatggtgataacaacttcttcctctcttacttcctccctctctgtcttcgccctgcccccagctatccgtctatactagttttctatttctgctgtagtaagttatcacaaatgtagtggttcatacaacacaagtttattatcttacagctctttaggttagaagtacaatatggcttggctctgtgtccccgcttaaatctcctgtcaaattgtaatccccaatgttagcggtggggcctgatgggaggtgattggaccatgggggtggagttgtcatgaatggtttattatcatccccttggtgctgttctcatgatagtgagttatcataagatgtggttgttaaaagtgtgtagcaccttccccctttctctcttcctcctgctctagccatgaaagatatgtttgtggccgggtgcggtagctcatgcctgtaatcccagcgctttgagaggctgaggcagtcggatcacctgaggtcaggagtttgagaccagcttggccaacatggcaaaaccccatctctgctaaaaatacaaaaattagccaggtgtggtggtgggtgcctgtaatcccagctacttgggaggctgaggcaagagaactgcttgaagaagctgttatctccataaatgggcagtatcaggctagtatgatactgctgtagtgccatcagtatgtggtctccaccttccaatttacttcatggtttaagatgggtggttgaacattaccacacactgactccagaactcaaaaaaaaggggaagggaatggcaatatagagtattaatcagatctctttacccaggctccctggaagtccaacacaacatttctcttttgcagtgttctgaacacttttgaagctcttttccaagaggctgcaaaagcccatggaatttccagagatataaatgtctttgttatgctaaggagttgacacatgccaactgaagcccctagatagcttcaggatacaggatggtcagcagaaagaataagcatgtaattagcaggttagtatatttagctgcctgacctctggtgagtggatactaaagactgagctcaaacaaatggccaaaggtttaatcaatcattactacttaatgaaaccccagtaaaaactctgtacatctaggcttagcagagcctcctggttggcaaacacattcacatgtcctgattctacaaaaggaagtcacacaggctctgtgttccctctcagacaatcatatgggtctcttcatttgactggtcctcctgattagcatcctttataataaacctgtcattctaagtatagttctttcctgaattctgccagtcattctagcaagttatcaaacctgaggggatcaaaggaactgctgaatgtataaccatttagtcagaagtatgggtaacctagggacaaattaagtgtagctggtatctgaagagtggtcatgttggggatcatgcccttgaacttgtggggtctgagctaactctggatggttagcagtagaacagaaccacagtacactcaatttgtgttgaaatagaatactgtaattcaggtggtattcaaatgtattttcactgtttttcaaacatagcaaaatagtgaaattgataagcaactgatataagaagcactttttagacaaaggtgaaaaatactgtttctctaacagcttttctctacagttgtggttctcgaggtgttcatgaactccttcactgggccctttcagggatctaccaagtcaaatctttttttcataaaaacactaagccattcttttcctttttctctcaattgacatttgcactacaggtacaaaagcaatgacagataaaattgctggctccctagcaccaatgaagacagtggaacaaaactgtaatcattgtattcttcattgtcatgcattcacaatttttttgaatctgtgaattcacaaaaaagacacttttgattaagaaaatccttgatttaaaaaatactctttttagcaaatctttttagcatctttttagcattttgtagtgaaatgagaaatacgcataaactatacctgctacataatgaagtacaatggttgtctcaaggaaaattatctgtgattaaattgcatgttgaactacagcttttttcatgaatcatctttttcatttgaaagaaaaactgagagataaactttgattattcagatttggatactcaacagacattttctcaaaaatgaatcaactgaacctatgacatcatggaaacacagatggtttttgataacaattataaaatttaagctttcagttgaaaagtcaaattttcaaaagcttctatctgccaccatgaacttaacagtttcctagtatttagaaacttttctgatttttccaaatgacaaatacatgacattacccgttcacatatgaataaagatctattccaagtacaagatagagaaatagattttaatgtaacaaaatagaaaaactcactactatggtttcagattctaatactggaattaatctttagaaaattatcactgttgaattttggtgtagtatgaaaggaagaatatcataattaccagaaaacaaatgattagaatattgctccatcttaatcacatatcatatatgtgttaggccagatatttttcatacatttccattgaaataatgtgttacaacactcacaaataaaaaaaaaaattcaaccatcttctattaagctatccactcattatttttatgaaaatagtaattgattcatataaacaaaagctcttgggtcctcaattctttaaagtgaaaaggactgctcaggccaaaaagcctgaaaaccactattctatagtgaatgcaaaccagggaaactaacaggaatattttcttctgtttgatgcatgttcaccagcaacagtaccacaaacttgtttcattttatattatgtccttctaatttgtttacttttttacatatttgaaattttaacacagataaaatttggtatatagtttattttttctaagtaactgtattttaatatgcctgaaaaaataatgaagagacatggttcacaagacatcaaaagagcatccagaaaaatgaaattggtaatgtgtctccattctgtccaagaggatgccctggaccactaaaaaatatacctggtccttgcaatagataaattcaagtggtagacacggatgagcatagcttgatgcagtagtcaataagatcatccaactaatcaccttattctagtaaccattttcacctgacagccttctggtcaaaatttggattcccatgtaaaactgacttcagaagagaatatggtgatgaacatctgattacttgagggttaaatatctatttttaaagtaataaattggaattttgatttgtatatcagtgaacttggttaagtccatcctatgagacagttctatatttattacattggcagatcggtcttcgaataataaatgctgctctgtgatcttgtctgggtagccaactgatcttccttagaaaatacacaaccacaacccttccgcaagcattatgctcatactacatcactgattacctaaattcacaccctgacaaagaagagggctctgccaataacaaagcatattaagttatatatttcagaataacggaataagagtgaaactttactaagaatagtgaataaaataatattttaaatgttaaataagttttgagataaggccttttaatgtttaattttagaataattctaggcattttaacagcataataactcctcaaaaaaagaagtgtatggtttggatgtcactttaagccatgaaatttttatctcagctatttaaataaagtatctcatctgaaatatggtacaatgtatactttacactgcattagctataacaataaataatggatcataaacatttacatataaaaagaacaaaatgaaaggtaagactatgcggaaaaaatactagaacaaccactagaagtttacaaaaaataagaagacagtacaaaaacatcaataaaatagattgaaaaataaagctgatgaactaattgccttgaatgtatcagaaaacttaagggaagacaaaatattagaaatcagtggccaggcatggtggttccgcctgtaatcccagcactttgggaggctgacgcgggtggatcacgaggtcaggagatcgagaccatcctggctaacacagtgaaaccccgtctctactaaaaatacaaaaaattaactgggcgtggtggcgggcacctgtagtcccagctactcaggaggctgaggcaggagaatggcatgaatctgggaggtggagcttgcagtgagccgagatcagagatcgcaccaccgcactccagcctgggtgacacagtgagactccgtctcaaaaaaaaaaaaaaagaaataattgacatatatcagataaactaattgcatgtattatcaaaacaatttcagaagcatgataaaattaagaatctggaagaaaactttcatagtaacttatcttagtaataaaacagaaaatgaatcagagcttcaaaagcaagaaagaagaaccaatacccccatccaaaggaactatctggaatgtaccaaaatgtttcaaaacagaaaaaaaaaaaccatatgattacaaaatgagaaaaaaggaaataatgaacaaaagattcatgtaatgtaacttagtataatttgaccataagattagggaaataaattaatactagtcattagcagtttttgtatcatctggtaaaagagttccaaggacaagaagttcaacaccatgaagtactattagaagatcagaatattatatgcaatactgcctagcttcattttaccaaagtgcaacaataattcaattcaatccaaagtaaatcaatagcatccattgattttctttctattctattcccacctctgactcctaaaacagtgcggcacacacgtcttagctctatcccagtgcccccaccaccatatgccacccttgcaatagctgtgtcttgtccatcactagcctggtgcagtctgtcctaatgaggaaaagcagggaagatgcccgcataggctcaggaccatttaaatggggaatcctgggatcctgggtctgcagagcatgatctaggagggaaaactatgggctctagcacagagatgtagcatggcccatgcagggcataatctttgggcaaaggctccagttaccgggcctagtgcctataattgacatactatcctcaaaattatcatttagcataaaatcatcctgattcgagttaaaatattatgtcactttacaaccaaagtgcaaagactaagttgttatagaatctgtgaaagttaatcaagtaatcaaaacatagtaaaatataaaaatgctcattataaagaacacatcattcaaaatccagtcatatctaatagagactacaaaacttaagcagatgtttacacaaaggcctataaactcaaactgatacaaagaactgggttaaagctaaacaagcagaggtcagcacagagctcctgtgattgaatcacaataaaacaatacactagtcctaagatagcaagaatatgatgcaataagtgaggctctggtcccaaaacagtataatgcccagtacaaatcaatttcacaaaaatctataatagaagtcaatgtaaattaggattaagaaaatcaaaattaacaacaaaaaatatatgaagaacaaaaaagaaacaactgaaaatatgaaaagtttataattaaaaaaagacacacagacatatatacatacatcaaagtctacaatcagaaaaaaacaatagatctcagaaatttagtgtgaaatttaagagtaaatagtaagttttagaaagaaaagaaatctgtcaacacagcccctcattttcgtgcctagggaaaataaggcttaatctacagccttggccaaatatgattgccagataaataaacccttagattctaccataagttaattaaaatgataaaaaaaaattcatatattagtttctaactccaaatttctttaagaaaaccttatgattcacaagcaaccaaccaattccaaactctatgccagtggttcttaacactggctacatattagaatcacctgggaagcattctaaaattgcttattccctgaactcaacccaaagaatctggtgttgtctaggcctaggttggttggtttttaaaaaaatgtcctatatgagtgtaaggtgtatcaagggtcaaagatcactgcatgaatcaaacagtatggatccaaattcccactacatttagcacaagtttggggaataaaaacttaccatttttagagacagagttcataaatagaatgggagaaactaggaaaactaattcaggggccaactctaggcaacaacaatcaaactgttccccttgctaaataaataaatacatatatagtatataaaatatatataaatatacatataatagacatttatataaatatatatgtgtatgtatgtcactatattttatatttcatctaaaattccataaattagaaagtcattgctgtttaaaaactatgtgtaacttctgcttctaggaagatagagtagatgtacattttcctatttctctcgttaagtacaaccaaaaaccatggacattatgaataaacaagcatacgaagatccagactgggcacagtggctcatgcctataatcccagccacttgggaagccgagtggggaggactgcttgaaaccaggaattcaagaccagttcaagaccactgtttctaaacatatatatatatatacacacacacacatatgaattctatatatacatatatatcaattctatatatatatcaacccatatatatagagagattctaatatatatatatatatatgaaagatggagagaaggcagaacagctagggatcttggaacccaaggaacataactgatgacttccctggatcttctttgtcccttatatattccacacttggggccagataagccaacaaccagaaaaagctaacaggtacaaacaaaaaagctccgacaaaaccctgcccaaaagatgaagagaagaacaccatggaaagaagaaaactttaggcaaatttcactctatgtcagccaaacaccacagaaaaaactgtagtcccactctaaccatgtcagaaaggcttagtggacagcctaaagttctatcctcatgagactataacaaggtcccacaatactcctgacatggtgagaaaagaacaagtagggagccaagaatttcacccctctggaaagtaaaaggacagccccccctagcagtgtcagtagacagcaagtagaacctgtacttcctctccaaactggcagcaatgaggtgatcctcccactacccactgaggaggactagaaaaaagttaaattaagactttcactaaccagtggaaattaggtaagcaccaatacaatagagactacacacggagagctagaatcaccactctgactcagcaataatgaggagccactcctgctacttgagtagggcaacagagactgaaaggggaatctggacttcaacaaactctacctggcagtgatgagctcccttcccctcttaaagtaatgtcataaacattcacctaaaacagaaggtttaaataagatccagtctcagaatataatggggaaataggtcctgttttcaaccaaaaattactcatcagaccaagagtcaaaaaaatcacaaactgaccaaaaaaacaaaaaagataaaagtcaacaccaaaaaaagacatgtcagaagtatctgacaaatattttaagagtctttaaaaaaatgcttcaatgaacaatcatgaaaataactgaaacaatgtaaaaatagaaagcctcagctttaccagtaccttgtgataatttatgtacatatagaataatactaaaataaaccaccaaaaagttttgcatagaaatatcctcataaacactatagataaatcaaaagaaaactcttaaaaaaaatcaagtaacccacaggaagtaaaaaaaaagaaaacagaaattaaaaaaatgcaaaactttagccataacatattaataattacattaaatgtaaatcgcctaaatatgccaattaaaaggcaaaaactgaaaaggtagattttaaaatgcaactcaattatatgtagtatataagaaactaacttataatataaaaatacaggcatgttgaaagaaaaatgatggaagaaatataacatgcaaacaataatcaaaccaaagcagaagtggctatattaataacagataaaggagacttcagcaaagaaaattaccagagacagagagggacattacatagtgatgagacataattcaccaagaaaatataacaagcactaatgtatatgtaccaaccaacaagctataaaatatatgaagcaaaaactaaaacttgaaaggagaaatagataaattcaccattatcagtagaaatgtcaatatcctctaacaacaagagataaaacaaatagacagaaaatcagcaaggatacagaagaaatcaacaacaccatcaacaaaatttatagaataccccacctcaacaacagcagagtacttattactttcaagtaatcatggaccatataccaagagagaacatatactgaggcataaaacatacatcaacaaattttaaagaactgaacagagtagagtctccaagcacaatggaatcacattagaaatcaataacagagacataataggaaaatcaagcacttgaaaactaaagaacacgctttcaaataatctatgtgtcaaagaagatgtctcgatcgggggaggagccaagatggccgaataggaacagctccggtctacagctcccagcgagagcgatgcagaagatgggtgatttctgcatttccatctgaggtaccgggttcatctcactagggagtgccagacagtgggcgcaggccagtgggtgtgcgcaccgtgcgcgagccgaagcagggcgaggcattgcctcacctgggaagcgcaaggggtcagggagttccctttccgagtcaaagaaaggggtgatggatgcacctggaaaatcgggtcactctcacccgaatactgcgcttttcagaccggcttaaaaaacggcgcaccacgagactatatcccacacctggcttggagggtcctacacccacagaatctcgctgattgctagcacaaagcagtctgagatcaaactgcaaggcggcagctaggctgggggaggggagcccgccattgcccgggcttgcttaggtaaacaaagcagccaggaagctccaactgggtggagcccaccagagttcaaggaggcctgcctgcctctgtaagctccacgtctaggggcagggcacagacaaacaaaaagacagcagtaacctctgcagacttaaatgtccctgtctgacagctttgaagagagcagtggttctcccagcacgcagctggagatctgagaacgggcagactacctcctcaagtgggtccctgacccctgacccccgagcagcctaactgggaggcaccccctagcaggggcacactgacacctcacacggcagggtattccaacagacctgcagctgagggtcctgtctgttagaaggaaaactaacaaacagaaaggacatccacaccgaaaacccatctgtacatcaccatcatcaaagaccaaaagtagataaaaccacaaagatggggaaaaaacagaacagaaaaactggaaactctaaaacacagagcgcctctcctcctccaaaggaacgcagttcctcaccagcaatggaacaaagctggatggagaatgactttgacgagctgagagaagaaggtttcagacgatcaaattactctgagctacgggaggacattcaaaccaaaggcaaagaagttgaaaactttgaaaaaaatttagaagaatgtataactagaataaccaatacagagaagtgcttaaaggagctgatggagctgaaaaccaaggctcgagaactacgtgaagaatgcagaagcctcaggagccgatgcgatcaactggaagaaagggtatcagcaatggaagatgaaatgaatgaaatgaagcgagaagggaagtttagagaaaaaagaataaaaagaaatgagcaaagcctccaagaaatatgggactatgtgaaaagaccaaatctacgtctaattggtgtacctgaaagtgatggggagaatggaaccaagttggaaaacactctgcaggatattatccaggagaacttccccaatctagcaaggcaggccaacgttcagattcaggaaatacagagaatgccacaaagatactcctcgagaagagcaactccaagacacataattgtcagattcaccaaagttgaaatgaaggaaaaaatgttaagggcagccagagagaaaggtcgggttaccctcaaagggaagcccatcagactaacagcggatctctcggcagaaaccctacaagccagaagagagtgggggccaatattcaacattcttaaagaaaagaattttcaacccagaatttcatatccagccaaactaagcttcataagtgaaggagaaataaaatcctttacagacaagcaaatgctgaaagattttgtgaccaccaggcctgccctaaaagagctcctgaaggaagcgctaaacatggaaaggaacaaccagtaccagccgctgcaaaatcatgccaaaatgtaaagaccatcgagactaggaagaaactgcatcaactaacgagcaaaataaccagctaacatcatcatgacaggatcaaattcacacataacaatattaactttaaatgtaaatggactaaatgctccaattaaaagacacagactggcaagttggataaagagtcaagacccatcagtgtgctgtattcaggaaacccatctcacgtgcagagacacacataggctcaaaataaaaggatggaggaagatctaccaagcaaatggaaaacaaaaaaaggcaggggttgcaatcctagtctctgataaaacagacgttaaaccaacaaagatcaaaagagacaaagaaggccattacataatggtaaagggatcaattcaacaagaagagctaactatactaaatatatatgcacccaatacaggagcacccagattcataaagcaagtcctgagtgacctacaaagagacttagactcccacacattaataatgggagactttaacaccccactgtcaacattagacagatcaacgagacagaaagtcaacaaggatacccaggaatttaactcatctccgcaccaagcggacctaatagacatctacagaactctccatcccaaatcaacagaatatacgtttttttcagcaccacaccacacctattccaaaattgaccacatagttggaagtaaagctctcctcagcaaatgtaaaagaacagaaattataacaaactatctctcagaccacagtgcaatcaaactagaattcaagattaagaatctcactcaaagccgctcaactacatggaaactgaacaacctgctcctgaatgactactgggtacataacgaaatgaaggcagaaataaagatgttctttgaaaccaacgagaacaaagacacaacataccagaatctctgggacgcattcaaagcagtgtgtagagggaaatttatagcactaaatgcccacaagagaaagcaggaaagatccaaaattgacaccctaacatcacaattaaaagaactagaaaagcaagagcaaacacattcaaaagctagcagaaggcaagaaataactaaaatcagagcagaactgaaggaaatagagacacaaaaaacccttcaaaaaatcaatgaatccaggagctggttttttgaaaggatcaacaaaattgatagaccgctagcaagactaacaaagaaaaaaagagaggaaaatcaaatcgacacaataaaaaatgataaaggggatatcaccaccgatcccacagaaatacaaactaccatcagagaatactacaaacacctctatgcaaataaactagaaaatctagaagaaatggatacattccttgacacatacactctcccaagactaaaccaggaagaagttgaatctctgaatagaccaataacaggagctgaaattgtggcaataatcaatagtttaccaacgaaaaagagtccaggaccagatggattcacagccgaattctaccagaggtacaaggaggaactagtaccattccttctgaaactattccaatcaatagaaaaagagggaatcctccctaactcattttaggaggccagcatcattctgataccaaagccgggcagagacacaaccaaaaagaagaattttagaccaatatccttgatgaacattgatgcaaaaatcctcaataaaatactggcaaaccgaatccagcagcacatcaaaaagcttatccaccatgatcaagtgggcttcatccctgggatgcaaggctggttcaatatacagaaatcaataaatgtaatccagcatataaacagagccaaagacaaaaaccacatgattatctcaatagatgcagaaaaagcctttgacaaaattcaacaacccttcatgctaaaaactctcaataaattaggtattgatgggacgtatttcaaaataataagagctatctatgacaaacccacagccaatatcatactgaatgggcaaaaactggaagcattccctttgaaaactggcacaagatagggatgccctctctcactgctgctattcaacatagtgttggaagttctggccagggcaatcaggcaggagaaggaaataaagggtattcaattaggaaaagaggaagtcaaactgtccctgtttgcagacgacatgattgtttatctagaaaaccccattgtctcagcccaaaatctccttaagctgataagcaacttcagcaaagtctcaggatacaaaatcaatgtacaaaaatcacaagcattcttatacaccaacaacagacaaacagagagccaaatcatgagtgaactcccattcacaattgcttcaaagagaataaaatacctaggaatccaacttacaagggatgtgaaggacctcttcaaggagaactacaaaccactgctcaaggaaatagaagaggatacaaacaaatggaagaacattccatgctcatgggtaggaagaatcaatatcgtgaaaaaggccatactgcccaaggtaatttacagattcaatgccatccccatcaagctaccaatgactttcttcacagaattggaaaaaactactttaaagttcatacggaaccaaaaaagagcccgcatcgccaagtcaatcctaagccaaaagaacaaagctggaggcatcacactacctgacttcaaactatactacaaggctacagtaaccaaaacagcatggtactggtaccaaaacagagatatagatcaatggaacagaacagagccctcagaagtaacgccgcatacctacaactatctgatctttgacaaacctgagaaaaacaagcaatggggaaaggattccctatttaataaatggtgctgggaaaactggctagccatatgtagaaagctgaaactggatcccttccttacaccttatacaaaaatcaattcaagatggagtaaagatttaaacgttagtcctaaaaccataaaaaccctagaagaaaacctaggcattaccattcaggacataggcgtggggaaggacttcatgtccaaaacaccaaaagcaatggcaacaaaagccaaaattgacaaatgggatctaattaaactaaagagcttctgcacagcaaaagaaactaccatcagagtgaacaggcaacctacaacatgggagaaaattttcgcaacctactcatctgacaaagggctaatatccagaatctacaatgaactcaaacaaatttacaagaaaaaaacaaacaaccccatcaaaaagtgggcgaaggacatgaacagacacttctcaaaagaagacatttatgcagccaaaaaatacatgaaaaaatgctcatcatcactggccatcagagaaatgcaaatcaaaaccacagtgagataccatctcacaccagttagaatggcaatcattaaaaagtcaggaaacaacaggtgctggagaggatgtggagaaataggaacacttttacactgttggtgggactgtaaactagttcaaccattgtggaagtcagtgtggcgattcctcagggatctagaactagaaataccatttgacccagccatcccattactgggtatatacccaaatgactataaatcatgctgctataaagacacatgcacaggtatgtttattgcggcattattcacaatagcaaagacttggaaccaacccaaatgtccaacaatgatagactggattaagaaaatgtggcacatatacaccatggaatactatgcagccataaaaaatgatgagttcatgtcctttgtagggacatggatgaaattggaaaccatcattctcagtaaactatcgcaagaacaaaaaaccaaacaccgcatattctcactcataggtgggaattgaacaatgagatcacatggtcacaggaaggggaatatcacactctggggactgtggtggggtgaggggaggggggaggggtagcattgggagatatacctaatgctagatgacgagttagtgggtgcagcacaccagcatggcacatgtatacatatgtaactaacctgcacaatgtgcacatgtaccctaaaacttaaagtataataaaaaaaataaataaataaataaataaataaataaaaaggtcaacatcaaaaaaaaaaagaagatgtctcaagggaaattaaaaaaaatacactaaaccgaataaaaatgaaaatacaacaaatcctgttaaaatttgtaggacacatgctgctacttgaagagcctagacaaagaagaacaaaaataaatgcaagacaagaagaaagaaaataataaagagtagaaatcaatacaatttaaaatatgaaaaaagttaaaaatatcaatgtaacaaacagctattttaaaaaacacacacacaagaaattgacaaacctcttccaaaatgacaaaaaagacaaaaagagtagtaaagtttctaaatatatttttgttttttaagcaactgtaaatggtattgcatttttaacttcaatgtccatgaattcattgttaatgtacacagaaaaacaactgattttttttttttttttttttttgagacggagtctcgctctgtcgcccaggctggagtgcagtggcgggatctcggctcactgcaagctccgcttcccgggttcacgccattctcctgcctcagcctcccaagtagctgggactacaggcgcccgccactacgcccagctaattttttgtatttttagtagagaccgttagtatttttgtattcaccgttttagccgggatggtctcgatctcctgacctcgtgatccgcccgcctcggcctcccaaagtgctgggattacaggcatgagccaccgcgcccggccaacaactgatttttatatcttgcatcttgaaaccttgttgcgcttactcattaattctatgagtttattcattggtattttctatgtagaaaatcatatcatctacaaaaggagatggtttcatttctacctttccaatctgtatgccttttcctttcacttcttgcctttttgagctggcaagaactcccagtactgtgctgaatgagtagtgagagtgaacatcgttcctgttcccaacattaggggaaaacattcagtcttttaccattaattatgatgttagctgaaaggtttttataggtattcttcatcaaattgaagaagttatctttattcctattattctgagatcattcaataccgtaaatgggtgctgaattgcatcaaatttttttttctacattatgtgacttttcttctttagtctgttaatatggtgcattacattgattcagctgaatggtactctccccacccaacaacccagctgtctgtatgttcttaaggtggaagctcagagtgttgttttttttaacactatgaccctgaataaagcaacatatctatatagctagtcccagaatcactggtaattgcttacataagaagctccgtatggccagatgatacagattgtggacacatgagaaaaaccttcttgttgcaagtaaaatatatctgtggctgagaaaaaaagaccgtcaaatgaaaaattctacatacaaaaaaaaaaatcagacattgggcacggtggctaacgcctgtaatcccagtactttgggaggctgaggcaggcagatcacttgaggtcaggagttcaagaccagcttggccaacatggtaaaaccctgtctctactaaaaaaaaaaaaaaaaaaaaaaaattagctgagtgtggtggtgcatgcctgtgttcccagctattcgtgaggcaggagaatctcttgaacccaggaggcagatgttgcagtgagctgagattgcgccactgcactccagcctgggtgacagtatgagactccatctccaaaaaaaaaaaaattggatttttttggtttactttccctgattctattaatcactgaatacaataaaccaaatactaaataggattagttatgactcataaataaacataaggatgtatattacattgccattcattcattgtatgtaaatttcctacagctagactataatatacagcttcccaaagcaatctaaaagtaacaaactttaatgatatagcacaactgaagtttggtatagtaagtgcaaataagtattgcaatgacaattcatcatggtaaactcaagggtctgtaaaaaatcaaattatcgaggaccgagttcaagaagaactatattaatacatagatttctgtaacttggcagagaattccctacaattgctacatttaaagtaatcaacacatttctatatctcagaagaagacggaaattatgtgttcgcctatcctaatgtattaaacttttattacaatagttttagtatatttttagcttaacattaaggtagaaacattctatcaaactaagaaatagaaattgctctgaaattgcaaaaacctgtactatttcccattttaaaatcagaaggattacttctacagcatttaattgttacatcttacaataataaattacatgggactaatatgcataatagaacacaacggtagtagtaataatgattgagcagtagtatatttacataccgataaaagaaaacccatgtagaagaaactgaagaaaataaacgctagagtgaacaaatgatgagtaatgctccaaaatacaagaaaaagaaagaatgggatacagaatagaggttgagagattggacttgagcagagaaggaaccctcttcctccacatggaacatattgtgagggagggaagaataagatgagaaggaggagaaaaagaaacgaagaaaaaataaagggaaggaagaaaggaagaaagagagggggaaaaaagacataaaggaaggaaggaaaagtatagatattgactgttacggactgaattgtgtcctgtccccccaccaccaccactaccaaattttatgtcaaagccctaatgctccatgttactgtatttgcagattgggcctttaaagaggtattaaggttaaatgaggtcataaaggtggggctctaatccaatatgacttgtgtccttataagaagaagaagagacattaggaatgtgtacattcaaaaccaaaggccagggctgggcacagtagcttatgcctgtaatcccagcactttgggaggccaaggcaggcagatcactggagcccaggagtttgagaacagcctgggcaacgtagcgacagcccgtctctacaaaatatacaacaattagccaggcatggtggtgtgcacctgtagtcccagctactcaggaggctgaggtggaaggatcatttgagctcaggaggtcgcggctgcagtgagctgtgatcacaccatgacattccagactgggagacagagcaagaccctgcctcaaacaaaaacaaaaacccaaaggccatgtgagaacacacagagaaggcagccatctgcaagccagagggagacctcagaagaaaccagacctgccaacaccttgatcttggaagtccagactccagaactgtaagaaaataaactgttgttgtttaaatcacccagtctttagcattttgttatagcagcaggaacagactaatacattaagttagacggagggacagaaacagtgaactgctaatagtctccagtttttctttggaccagaaagcaagtctgacaaaaccaaggagagatggggtaaagaaattttgcaacagacccagaagagaatgaggtggtaggcgtaggggaacatgtgaaaggattgccaactgtccatttcagattagaaatcaatcttttgggggcatcagtcttcacagttacataattgcagttaagcagcctggttacgaggaacacagcaaaatgggaaaggtaaaaacctttgaggttttttaagtctgagtgataacctagctctatcagtgtagctgtgtcttgggttgttatctagagttataataatgatagttacatagagtgtgccaataataatatctactccttttagagttgttttagagttatgtaaaactttatcatagagttggtcagatagtagacaataaataatagctactatacttattactatgggattagtgtagtattggtacattgttaggaagatacagcaaaaaagagaaggaaaaaaaggaattaaaagaaagtggttcagccgggtgcggtagttcatgactgtaatcccagcactttgggagaccaaggcgggtgggatcacttgaggtcaggagttcgagactagcctgggcaacatggtgaaaccccatctctactaaaaatacaaaaaatgagccgggtatggtggcagatacctgtaatcccagctactcgggaagctgaggcaggagaatcacttgaacctgggaggtggaggttgcagtgagttgagatcgtgccactgcactcaagcctgggcaaaaagagtggaactctgtctcaaaaaagaaaaaaaaaagaaagtggttcaagtgacagagtagagtcttggctagatagaggagtaaagtgaatgcctgaggatactgacaagctggaaaacaggaggaaaaataagttaaatggcctgaggatgaagtccagttgaattttaaacccaagaaaatgagaaagatcgaaagattggtaattaaaataaaatcctccagagaagactgctgagtgtgaatcagcagctacttcttatatgtaacaccacagagaaacataacaaaaaaagaaagccagctaaatggtcgtggccttgtcattagctagcagtgtatcttgaaagaaggcgcttaaactgtgagccttactgctatttgaggattactgacaaattacctctggtttctcctttattccacttccactgtaccctctctccgacaacacacacatacacacatacacactcatcattatagtaaagatcaagaaaggcagtaaacaagagcaaagatctggaaagaaggcacattttcaaaactgacatttgtcttgtgcatcctcccacttcccttttccctctcccagtcccacctctacaagcccaaaaaccccagctctcactgctggctctgctcccagaaaaagcccaaagtgccatgtttctctttgacctttcttccctccctcccacctattaaaacttccactgagtctatctcagtttaacaagggaaaaggcaaactgattatgccttttcataatgatgccaggatgaacagtaactcatctgtgcttaaacctcccaagtgtgtttggcttaaaaattgaaacgaatctatttggcaaaatttcaggcagaatggaaaggggataatttggggcaaggagattttctttcttccctgttttaaagttgtgaggaagaaaaagaagtgtttgtcgtaactgacaacagacaaccaccacagaaaaaacatccacagcagctcagaatgctagactgctacacttaagggtactttttaggtgtacaggcctgcataggatgctgaagtggggggcttatgatagcaaacatgaggaagcaatctaccctactataaccctgaaaaaagtggttcagaaccatctaccacgtcatggtaatgactctcttttctcttccctttattacagaggctgcccctcaccctgccccccagatgctcccctgataaaaggaggtggggaaaaaggaggcagccataaaggcagcagcaggagtgaactctccatcttagttatttcctgttagaagtggggaaagaatctgcagcatagaagccttaacagaagcctgagtataaagcaagaaaatagctgtagatagaatcacatgaaaaagtgactatacaggaaaaggtgccattcaatgagaaaagggggaaaagtatcactgaagaaaagaaacactctcttcccaaaaaaggtagaaatacaatcaaatgtttcagagcagggatcagaaaacttcggcccacatgccaaatctaaccagtctcctgttttggtaaataaagttttatgggaacacagccacactcattcatttatgtgctgtctatatggctactttcacattataatggaagagctgaatgactgcagcagagaccatataacttgtaaagactaaaatatttactatctggccctttacagaaaaaaggccctgctttaggaggtcaggggtaagaaggggactgagatgaggccatcggatttgataataagtgatctctggcaaatatgaagaaataatttaaaagaagtttaaaagaaactaaatgtattctaataaagtagagacaatgaggataaggtattctttcaaacagcctctaggaacaaaggaagactacatgcaagtctgcatggggaaataagaaattttcttgatctcaccaatcttcctcctcttggagtcactctctttaatcaccaaccaaacagcttcccaaactagaaactgcagaattttggtaagtgattctagctccacactgctttctgtatcctcagttccaggtgcaatgcttagtatacaaaagataatgtttgttgagtaaaacaatttaagagtacagaatgtagagagaaaagattgagaagagagaaaaaaattctgtccccacttcatacctggaaaaacattccatgccacctctaatggctatgtggcttggactcaagtcttaagagtcatcataggccaggcgcagtggctcatgcttgtaatctcaacactttgggaggccaagcccagcagatcacttgaactcaggggttcaagaccagcctggccaacatggtaaaaccccgtctctactaaaaatataaaaattagccgggcacagcagtacatgcctataatcccagcactttgggagactgagacaggtgtatcacttgaggtcaggagttcaagatcagcctggccaacatggtgaaaccctgtctctactaaaaacataaaaattagccaagcgtggtggcatgtgcctgtaatcccagctacttgggaggctgagacaggaaaatcgcttgaacccaggaggcagaggttgcagtgagccgagatcgtgccactgcactaaaaaaagaaaaaagaaaaaaaaaaaaaaaaaggtctggttatttaaaagagcctgagactcctcccctttcttttgctcctgctatcaccatgtgacatactcatgcccccactgcctcaggaagtaaaagcttcctgaagcctcaccagaagccaagcagatgctggcatcatgcttgtatgacctgtagaactgtaggccaattaaacctcttttatttataaattacccagcttcaggtatttatttatagcaatgcaaaaacaagctaacacacacacagcaaagcctaagatttacatctatgtttactaccaaaaattttatagatttagctgttaaatttaggtctttggtgcattttgaattaacatttttacagggtatgaggttggagtctaatttcatttttgtacatgtgggtatctaattgtgccagcacactatgttgttttaacatcaaatgagaaaatatataagataatttgatactacaaatatttgtggttgttaaaattcaggtactaagcaaacagctcagtagaatactacaacaaacatgtaacctaattctcctgtctctagtttctcctttaatatctgttttatatctgtgtaaaacacagtccagtaatgcaacaactctacataaaactaaagatacctactgctgacagaattagaatttctggaaattctgagacagaacttgcccctgatttttccagtttatacaagctatccacaatccttcgctcatggcctccttcctctcttttcaattttccaggctcatctcttaccattgttcccaaccacttggtctggctacacaatgttactagacacatctgatgtgaagtactcttgaaagactctgtagattactcatgctagacttttggctttccttaacctgggggttccctgaagcagaaagaattttatttatccctatattcaagagtccaggagagtgcccaacacaaagcaggtgtttcataaacacttgctaagttaaaggaatacacaggcaggcatggtggctcacacctgtaatcccagcactttggaaggcagaggtgggaggatcacttgaggccaagagttagaaactagcctgggcaaaatagcgcaaccctatctctacaaaagtaaaattttaaaaatcagccagtcctagtggtatgtgcctatgttcccagctactcaggaggctgaggcagaagaacagcttgaggccaggagttcaagacagcagtgagctatgatcacaccactgcactctatcccaggcaatagaggaatatcctgtctccactcccctccacactccaaaaaaaaaaaaaaaaaaaaaaaggaatgtgcctataaatggaagacagtgacgaaggtaaaggaataaagtagacgaaggcaacaggtttggaaaacattaaatcatcttgtttggcaggaaaaattgtctatatagggggatgttgagagaagcctggaaacctggatgggacagcaagagtaaaggccaagtgaggaatttgtacagtgatagttttttagggtaacttgatggatttttagacacagattataccaattctcttttcccccaataagagatttgtgactttggctaaattatttgactcagaaaagactcaagtacttcatacacaaaattagactaatctctttagtatgataggctcagctggtaggcccatcaccctagacacagaagaaaaaaataatcatgctataataaggaagcttgacagtcatttacgagagtttaccaacttttgagcagtgaaatctactttccaaataaactcatacatggaaccctagtacagaaaccttttttaaacccacaataattgaaaggggcatgaaaaaaactggagaccccacacacccaccttccttcctctcacaaacattggttcatataatcaagtggacttcaaatcaaatatggggaaccctaaacactactttagaacatggtcaaaagtttactaatctagagggatccaggtaaagtcatacaaccaagattcccctttgtggctactgattcgaaaataaatgctagggaggaaacaaagataaaaactaaagatggaaaggaaggtcctactgtaattttcctgaccagaccaatggagggcataaactaggatggtagtattaaaaagacagaagccaagcaaatataacatacagaaactgttttcactttgttttccgtattcttgatgggaaccatgctgacccaggagagactgcccctcccaaggctagctacttcttagacagcaaactacccctccttgagtgcttttcgcatgcaaaccactcaatctaaaactacctcccatccatccccagtattcagctctcacagaactcttatattctgggactattagaatagtcccctgttctaataatcacgccagggccaggtatcaaacaacttgggggctgctcttatatgtgactatgccgacattattaaaaccagccaattctaagcctccttaccctgcctcgcctgttccttctcactaaaatcatgataaaggctctcccccatgatttccctagctatttctgcctcctaaacaaccctggtgcttccctatgagcactatgtggcgtggcatatatgccaccctgtctgatgtgccatgccctctccacttagaaactgtatcaatcttttcaatggcagttgtctcctgacgtgttagtttcaccatatttgaataataatataaaccacattttaaaaatagttcaggaccaagcaccaaacaaacagcacgtacttagagaataaaatgtgaagtattaagaatcagtattaaggctgggcatggtgggtcatgcctgtaatcccagcactttgggaggctaaggcgagaggactgcttgagcccacgtgttcgagaccagcctgggcaacacaatgagaccccatctccacaaaaaaattttaaaaattagcaggggtggtggcacacgcctgaagttgcagctacttgggaggccaaggtgggagaatcacttgagcctgggaggtcagggctactgtgaaccctaatggcaccagtgtactccagcctgggtgacagagaggaacagaagaagaaggagaaggagaaggagaaggagaaggaggagaaggaggagaaggagaagaaggaggagaaggaggagaaggaggagaaggaggagaagaaggagaagaaggataaggagaaggagaagaacaagaagaagaagaggaagaggaagaggaagaagaggaagaggaagaagaagaagaagaaagaaagaaacagtataaagatgagattttctagttatgagagatgccaaagcagaatgttttaagagataaacctgacatatagtaaacatttctttttttttattaaaacacattaactataaatatgtttaacatcatttcttatcttcatcattcaagatatctgagccaaaaacctaggccaaaaatcctgactctcatttacattccacatttagataatcagaaaatacaaatatccagaatctggccacatctcaacaactttacctttactaccctggttcaggccgccattatctcttacctggactactgaagaagtaacctcctcactattcacctggcttccattcttgtcctgctacaatcccttctcaatgaagaacgagccgtttaaatcacacatcagaccataccattcctctgctcaaaaccctgcaatggtttcctgtttcactcagggtaaaagctaaaggtcctgccgtggtttatgaaggctctaagtgatctggttccctgccatccctctgatctcatctcctacttctttcaccatcttatccagctccagccacttaaacctccttactgtttctaaaacatcaaacacagtcacacatcagtttactctgactagaacgttctttccccagaaatctgcattgctcatttacttagctccttcacatctctactataagtcaccttattagacaggcctttcttgaccatcctacatataatatcacaaacatatctgtcattctgtatccctcttatcctgctttttcttcatagctgttatcagtacctgatatgctatagttttcgtttttttgtgtgtttttttcccgagacagtgtctcactctgtctcccaggctagagggcagtggcacgacctcggctcactgcaacctccgcctcctgggttcaagcaattctcctgcctcagcctccaaagtagctgggactacaggcatacgccactatgcccacctactttttgtatttttaatagaaaatgcgtttcactatgttggtcaggctggtcttgaactcctgactttgggtgatccacccgcctcagcctcccaaagtgctgggattacaggcgtgggccactgtgcccagctttttgtgtgtaatttactgtctttccccactacaaataggtacctaagagattggaactttgtttcattcactgttatgtatgagtgcctaaaacagtgtctgagcaggcactcaataaatatgaaataaattaatataccaaagcctttctgagggatttacacttgtactgctcaaaaatccataaacctcgcaaagagacaaaactggatcactagtggtaatatataaaaatgtaaaaataaaaatgtagtcttctaagaaagatagaaggcttgacagtaaatgattaactaccaaaagaataaagtataaatgagagattggcgaccatgtgaactcacctcaagagaataatagatacctacaaatgaacatgtgaaaaactttataataaaactatataattaagcacagagaataagactatcttgccaagatttgctaacttggcaaacatccatattaaactcagcttccccaattccagatacaaatgaaattgtgaatttggcaattcactggagagaaagactgcattacaatctaggttcacattaaagttacctcattcttctcaacttagatctgacgcagaggaaaatttttaacagattctattggacatatgccatactatagtcagtaaagttcaacattaacattttagatgttaacctaaatgatttgttttcctaaaactaaactgcactaaaaaaatatgcattatgagtataaaatgaattattttaaataatattttgtcaaagaaaaagcaatttataacaccagtccttccctcgtattttgatttcattcatgtagtgcctcacccacagctgaacacatggtagcactcaagctgttcactgataagagagagaatattctttccttcaaggtttattaaatatagatatgtccacctcaaccttcccagttattaaaaaatgcaaatgaaaattatgtaccccaaatttgtatataaatgtattaatcatttatttaataattagtatgtcataaagcgtagtattagatactgaagacacaaaataaaaattacacatgctgctatcaataacttcataatgtggtagagaagtcatataaactataacagaagatgataacttgtatggtcttggggcacacaagatgcaaaggaagcccagaagaaaagttcccaagatagaatgtgtagaaaaaagatgggagaaaatgcaggcataaagtaacacttagaagaaggcagaggtaaacctaacactacctacaaatgatagtatggctaaaggaaaggaaatatcacatgaataaagatgtatgcagagcccaaggtcttacatgacacccttaaaaatttggctattaatggggaggatcttaagtaagacagtaatatgagttgtgtttcatttaagatgatcaatctagcagcatcatgaagtttactttagagaggagattgagactgcagattattaaatcagttggtactgatccagaagaaggtagaacgatggcggtggcgttggctttgccagctcaggactgagtgcaagtaacagagaatcagccagattctccagaggctcttcaggttctcctctgtctttcagtcagcagtctcagtccatttgcggaggaacattggtgttacagcagtggcgtttaataaggaacttgatcctgtacagaaactctttatgtacaaggttagagaatacaaatctaagtgacagacatctggaggatctgttgatactgatccagagtaccagcaagagccagagaagaagctttttaagctcaagcaagtgtatggtaaagcagacatgaatacattccctaacttcaaatttgaagatcccaaacttgaagtcatcaaaaaaccccaggcctgaagaaataaagtaaaattaacctggtaagttgtcaagggttagctgtacaactagctagaagtttcagaataaacatacattcacaactgtcaaatgttcttttaatctcgattccaaataaattagttggtgatgtggagtattaaaaaaatctggaaggaaaaataaagatgtggacgaaaagaaggggatattacttgagagatattaagaaagttacagagatgggaactggtgaataatgaaaacttgaatcagcacagtggcagtggagctggacaggaaggagggaaggaaacatcaacaggacctggtgactgattaaaggcagaagattgggccaggcacagtggcctgtaatgccagcactttgggaggccaaggcaggcggatcacttgagtccaggagtttgagaacagcctgggcaacatggtgaaaccctgtctctaaaagaaaaaatatatatatatacaaaaattaaccaggggtggtggtgcatgcctgtagtcccagctactcgggaggctgaggtgggaggatcacttgaacccaggaagcggaggttccagtgagcggagatcgtgccactgcactctagtctgggtgacagagtgagaccctgtctcaaaataaaataaaaaataaaggcggaagattggacagagggaggatactcttggttaatggcaccaccatctaaccagttgtttcaaatacatagttggttcaaatataaagggagaaacaagcctgatgaaaaaacagtgaaaacaacttggagatattggatttgaattatctcaaaatagtaaagaaaattatataagcagattactagaaatatgtctagaattcaagacagagataaaagctggaggaaagccagggaatggagacagcagtgttctctactgctgtcttaaccctttctttcagagccacatataaaagcagttcactggcacctctgcttcctgggtccaagtgattctcccacctcagcctcccaagtagctgggactacaggcatgcgtttttatactattttgagagaattcaaatgcaatatccccaggttattttcactgttttttcattctcccaaaggaaaactgtttgtctcctaaatcaaggagcacgtgagcctgtaaagttccatagcagagaggaaataagtgatgggtaggagaaaaaaaaacaagaagaaagaggcatacccttctataatactacagccagaaaagggtaaaatgaggccccaaagttcaggcatatgtatatggccatttaactaggactttttaagcaataagcatgctgtgcttaggctgtctcagcactattgttaaatgctttaattatgtaacttttgatacattcatgttatcatatgttgtaattattgttgttactattacattttctctatatagcacttattatgtatggggcaatgtactaagtagctttacaaaaattatttcttttaatcctcaccaaaaccctatgaggaagtatttctccattttatatatgagaaaactgagggatagaaaggttaaataacttgccctcaaatactcagcaaataaaggacagagttgaaaatggaacccaggcagtctagctccaaagtccatgatcttaatcatcaagttatactacctcttttcaggtggataaagaatacttttggttactaacttaatctgaagacaactattttctagtaggaaatatttctaattttacaatacatgtaggagaaaattgagtttactgatcagaaacttgctagactacattattaagtaaaaaaacacacagaattaaaatattatttaaaacatctgtacatttttaatctgtataaacatgtatatataacaatagttctcatctatataaatatgtacatataataattgttcttaaattttactatgcatcagaatttcttggtgggcttgttaaatgcagattgctgaacccctacttcaaaccccaatctttcccctattacttacgaaataaagtacaacttcttttcagcatggcttacctttggccatgaggcatcgtctaaccatctttcaataagtttttagtacattacctatttttttatgctttccctaatacaacccttcctaataaagccatacattccttctatgattccaaagcacctctaaaatagtaaaaaacagaacaatgataataatatcaattaactctgtggggcattcccaaggaaacatgaattacctcattcaatcctcataacaactcctcaggataaagattataattattctcactgtacatatgggaaaaaagtgagacatggagaggttaaattgggcatggtaatacaatcagcaagtagaaaagctaggattctaccactgcaattatactatataagcaattactagattgttcagtacttggatactatttagatactagatttttctaagtactaatgtaaataatttccttattcatttttacacttatttaactgacatttactgactgcctatcatatgccaggcattgtgttaggcacgaaagactatcatgttaaaatacaagggaagacccagtacctgctctcttgagacatggaatccagtggaaaaaccaaacattaaattaaaaatcagagaaatatttcaagaaatatgtgttaaagacaaaaagtacaaggcactccaagattataataggaagatctaagctgtttatagttattgtactggcagtgtcctattacaagagtataagttacacagaatttgcatttcaggatgccaaataattccatttcaaaatgacgctttcaaaatcaaattaattaattataagaccaaagtcatatagttaaaatttaaaacatattatttaaaatgaaatttaaatatgtcagctctttatttttccccttagcaaatggagctattacgcatctgacacagaatgtaataaatataaactatccaaaactaataaaatagcatttgaaaatgtccttgcaatattggtcatgataaaggtaaaataatatgccaagttcctgacaatcctagtagtgcataaagtacttccattttggacaatgctaactttcttatgattgaattagatccatgacttaatatacatcatttgtaagattttttttttttttttttacaaaaagcagacttctttcataataaatttcaaaatgaaaaccaatgtttttttacagaggaaaaatgcctaaaagtccaaatactgatcttacaaagagacatgaaaggtaaaatcaagtatgaaccaggcctggattcccacatcttcagtttctatttatcaaacagaaaaatctttccaactttctcctttcctgtataagaccaaaactatgcaatattctgtttgtattacaattacactaattcaatgcaggtcacttgctttttactgagtccagatgacattcagtaaactaaacatgggccaattagtttaaaaaaaagaggaagaaaagaaaaaaggaagaaacgagtgagttctgattgcctttgggtaggtcatacagtggctacagagcatcacagcctgaacttcattttggctaacaccaaccatacggctaacattaaggactagcattttttattcctttcagatttctcacatttggaaattccaatttaaataattttctggtgaaagtgaggacagcactcctgcataatatcagttttcccctaattcaactccaatgtcttattttggagctactaaaatggaatctgcacaatgtctaaaaaagtataataatcctttttaaccaatttttttatgtattacagttttaaatgagcaaatgaaactgataatttagctgacacaaacccacacaaaaaaagatggtctaaagctatgaagtttcaacatcaatgtttgtaatctcaaatcaacctgaaccaccatacaattaggtatatgacaaactaagtaatagaaatattcataactaaaagcaatattatttttaaatatcttattaggtgttggcacccaacattttcttataatctatcatgtaaagaaatctgttttactattccttttaaactctctactcatgctactttaggtgtgtttctagaaataaatactaaactctctgctaattttttttggctaagaaattttttgaaagttataatgtaactaagttaaaatgtacatataatcataatttgatatcaagactgctttcatacaaaaaacctacattaattaattccttaagtaaatttacactttatcaattgttggtattttaaaaagtactcaaaagaaactcttcattcaccattattacaaaaatggaagtctccaaatatgtaaactagcttgatttttaaatttgttacttatttagcctaatttttttaaacttgcctaaatttaactgaagaatattatgttcctgcaagtgttcatgaatacaaagatacagtaatgaagatggaaattatttactctaacaattctgactgcatgactgttaaatcacttacatacggccaaatgatctacaaggaagcagggaggtcctgaaattgtgtactcatatccattttcaactactgcacaggtgacacaaccaatcaaggcattactgaaacagaatgggaatagaaaggacttagtgaataaaagtgacttctttagacaaaaatgtagaggttagcttgtgaccaaggtggaagaaacagcagcaccattcctcccattgcttgttcatattaagagaaaactgagaccactaagaggcaaaggacagaggacagcaacaccagcaaagagacaggcagcagtggggtcagagcatgagaacagtattaagagttaaacatagagcacagagggggtggtttaaaatgtcagttttactcaattatttataggacagttcttggaaataatgttacaatgaaatgttggttatataaaaatcttatttaatgtagtaattactatttagacaagggcaaatatagtaaatattaagtaaaaattaacaataattaaaatgggcttatggtctgaaatagacatattatgggaaaggattactgttctaacaactacgcataaagctgtgaaaaggcaatagttatactagtctgtagaaacagtactctaaaagttacaataaggagatacacttttttttttttttttttgagcaaggtcttattctgtcacccacactggaacacagtggcatgatcacagctcactgcagtctcaacctcctgggctcaaccgatcctctcacctcaggttcctgagtagctgggactacaggcgcatgccaccacacccagctaattgtttttgtatgttttgtagagacagggttttgtcatgttgcccaggctggtatgaaattcctgggctcaagcaatccacccacctcagcctcccaaagtgctgggattataggcatgaggcaccatgcctggtccaatatggatattaatcctcctgaaatagatgggattttaaaatgcaatactcagtttcaatgttgaaatgtgctcttctttcactgaaaatgacatgacactgtgaa

SEQ ID NO: 22 - DNA, 172147 bp, Homo sapiens
atttaagtgaatataataataagaaaagtcaattcaagggctctacctgacatacccaaatgaacaagagtaaaaagagatgcaagcaaatgagtaaaccagtatctgagatactcactccaaggaaaaggccccaaacataaagcatgagtttcaaggacaagataaaactcctaaaaagagattaagagaaataaatggggtactaggcaagaataatacaaaatgtcacacaggattattaactggattacaaaaaaggtacatgaatagaaaataaataagcaaatgactaattagtaaaatcaaggaacagggtcagaggagtaacaacggtaaaaactgctatggtgaataacaaaaatatatgagatacagcattcttagatactagcattagccgactagaaaatataacagcaacaaaagatcattcacattagcagtaaaaatgacaaagctcctagaagcaaatcaaatttaaaacgtatataattttctttttcttttttttttagatggagtttcactctttcgcctaggctagactgcagtggcgcaatctcagctcattgcaacctctgccccgcaggttcaagagattctcctgcctcagcctccagagtagctgggattataggcacctgccagcacacccagctaatttttttgtatttttagtagagacagagttttgccgtgttggccaggctggtctcaaactcctgacctcaggtgatccacctgccttggcctccagaagtgccaggattacaggcgtgagccaccgcacccggccgaatgattttcaagaggatttaaaaatgcatttaaatacaaaaaagaagaactgaacacaaagatattctatgatcatgcattggaaaatattagttaacacaaattatgagttaaatgtaattccaatcacaaacccagcaagactttttgtggagcttgacaacttattctaaaacttatgtgaggccagacacggtggctcatgcctctaatctcaacactttagatgaccgggtggatcaccccacgtcaggagttccagaccagcctggccaacgtggcgaaaccctatctctactaaaaatataaaaattagctgggtgtgatagtgggtgcttataatcccagctactagggaggatgaggcacaagaatcacttgaatctgggaggcggaagttgcagtgagccaagatcacgccattgcactccagcctggggaacaagaacgaaactccgactcaaaataaaataaaaaataaaataaataaataaataaaacttataagagagatcaaggaaaacaaagacaagggaattgcatcccaaacatcaagcacgccaccatataattaagaacatatttctggatccgggagccaagatggctgaataggaacagctctggtctacagctcccagcgtgagcgacgcagaagacgggtgatttctgcatttccatctgaggtaccaggttcatctcactagagagtgccagacagtgggcgcaggacagtgggtgcagcgcaccgtgtgcgagcctaagcagggcgaggcattgcctcactcgggaagcgcaaggggttcagggagttccctttcctagtcaaagaaaggggtgacagagggcacctggaaaatcgggtcactcccacccgaatactgcgcttttccgacgcgcttaaaaaacggttcaccaggagattatatcccacacctggctcggagggtcctacgcccaaggagtctcactgattgctagcacagcagtctgagatcaaactgcaaggcagcggcgaggctgggggaggggcgcccgccattgcccaagcttgcttaggtaaacaaagcagccgggaagctccaactgggtggagcccaccacagctcaaggaggcctgcctgcctctgtaggctccacctctgggggcagggcacagacaaacaaaaagacagcagtaacctctgcagacttaaatgtccctgtctgaacagctttgaagacagcagtggttctcccagcacgcagctggagatctgagaacgggcagactgcctcctcaagtgggtccctgacccctgaccctggagcagcctaactgggaggcacccccaagtaggggcagactgacacctcacacggccgggtactcctctgagacaaaacttccagaggaacgatcagacagcagcattcgcggttcatgaaaatccgctgttctgcagccaccgctgctggtacccaggcaaacagagtctgtagtggacctctagcaaactccaacacacctgcagctgagggtcctgtctgttagaaggaaaactaacaaacagaaaggacatccacaccaaaaacccatctgtacatcaccatcatcaaagaccaaaagtagataaaaccacaaagatggggaaaaaacagagcagaaaaactggaaactctaaaaagcagagtgcctctcctcctccaaaggaacgcagctcctcaccagcaacggaacaaagctggacggagaatgactttgacgagttgagagaagaaggcttcagacaatcaaactactccaagctacaggaggaaattcaaaccaaaggcaaagaagttgaaaactttgaaaaaaatttagacgaatgtataactagaataaccaatacagagaagtgcttaaaggagctgatggagctgaaagccaaggctcgagaactacgtgaagaatgcagaagcctcaggagccgatgcgatcaactggaagaaagggtatcagtgatggaagacgaaataaatgaaatgaagcgagaagggaagtttagagaaaaagaacaaaaagaaatgaacaaagcctccaagaaatatgggactatgtgaaaagaccagatcttcgtctcactggtgtacctgaaagtgacggggagaatggaaccaagttggaaaacactctgcaggatattatccaggagaacttccccaatctagcaaggcaggccaacattcagattcaggaaatacagagaacgccacaaagatactcctcgagaagagcaactccaagacacataattgtcagattcaccaaagttaaaatgaaggaaaaaatgttaagggcagccagagagaaaggtcgggttacccacaaagggaagcccatcagactaacagctgatctctcagcagaaactctacaagccagaagacagtgggggccaatattcaagattattaaagaaaagaatttttaaaccagaatttcatatccagccaaactaagcttcataagtgaaggagaaataaaatacttaacagacaagcaaaggctgagagattttgtcaccaccaggcgtgccctaaaagagctcctgaaggaagcaataaacatggaaaggaacaaccggtaccagccactgcaaaatcatgccaaattgtaaagaccatcgaggctaggaagaaacggtatcaactaatgagcaaaataaccagctaacatcataatgacaggatcaaattcacatataacaatattaactttaaatgtaaatggactaaatgctccaattaaaagatacagactggcaaattggataaagagtcaagacccatcagtgtgctgtattcaggaaacccatctcacaagcagagacacacaaaggctcaaaataaaaggatggaggaagatctaccaagcaaatggaaaacaaaaaaaggcaggggttgcaatcctagtctctgataaaacagactttaaaccaacaaagatcaaaagagacaaagaaggccattacataatggtagagggatcaattcaacaagaagagctaactatcctaaacatatatgcacccaatacaggagcacccagattcataaagcaagtcctgactgacctacatagagacttagactcccacacaataataatgggagactttaacaccccactgtcaacattagacagatcaaccagacagaaagttaacaaggatatccaggaattgaactcagctgtgtaccaagtggacctaatagacatctacagaactctccaccccaaatcaacagaatatacatttttttcagcaccacaccacacctgttccaaaattgaccacatagttggaagtaaagctctcctcagcaaatgtaaaagatcagaaattataacaaactgtctctcagaccacagtacaatcaaactagaactcaggattaagacactcactcaaaaccactcaactacatggaaactgaacaacctgctcctgaatgactactgggtacataatgaaacgaaggcagaaataaagatggtctttaaaaccaatgagaacaaagacacaacataccagaatcgctgggacacattcaaagcagtgtgtagagggaaatttatagcactaaatgcccacaagagaaagcaggaaagatccaaaattgacaccctaacatcacaattaaaagaactagaaaagcaagagcaaacacattcaaaagctagcagaaggcaagaaataactaaaatcgaaccagaactgaaggaaatagagacacaaaagactaatgaatccaggagctggttttttgaaaggatcatcaaaattgatagactgctagcaagactaatgaagaaaagagagaagaatcaaatagaagcaataaaaaatgataaaggggatatcacgaccgatcccacagaaatacaaactaccatcagagaatactacaaacacctctacgcaaataaactagaaaatctagaagaaatggataaattcctcgacacatacaccctcccaagactaaaccaggaagaagttgaatctctgaatagaacaataacaggctctgaaattgtggcaataatcaatagcttaccaaccaaaaagagtccaggaccagatggattcacagccgaattctaccagaggtacaaggaggaactggtaccattccttctgaaactattccaatcaatagaaaaagagggaattctcccaaactcattttatgaggccagcatcatcctgataccaaagccgggcagaaacacaaccaaaaaagagaattttagaccaatatccttgatgaacgttgatgcaaaaatgctcaataaaatactggcaaaacgaatccagcagcacatcaaaaagcttatccaccatgaccaagtgggattcatccctgggatgcaaggctggttcaacatacgcaaatcaataaacgtaatccatcacgtaaacagaaccaacgacaaaaaccatatgattatctcaatagatgcagaaaaggcctttgacaaaattcaacaacgcttcatgctaaaaactctcaataaattatgtatcgatgggacatatctcaaaataataagagctatctatgacaaacccacagccaatatcatactgaatgggcaaaaactggaagcattccctttgaaaactggcacaagacagggatgccctctcaccactcctattcaacacagtgttggaagttctggccagggcaattaggcaggagaaggaaatcaagggtattcaattaggaaaagaggaaggcaaattgtccctgtttgcagatgacatgattggatatctagaaaaccccattgtcttagcccaaaatctccttaagctgataagcaacttcagcaaagtctcaggatacaaaatcaatgtacaaaaatcacaagcattcttatacaccaataacagacaaacagagagccaaatcatgagtgaattcccattcacaattgcttcaaagagaataaaatacctaggaatccaacttacaagggacgtgaaggacctcttcaaggagaactacaaaccactgctcaatgaaataaaagaggatacaaagaaatggaagaacattccatgctcatgggtaggaagaatcaatatcgtgaaaatggccatactgcccaaggtattttatagattcaatgccatccccatcaagctaccaatgactttcttcacagaattggacaaaagtactttaaagttcatatggaaaaaaaaaaaaaagagcccgcatcgccaagtcaatcctaagccaaaagaacaaagctggaggcatcatactacctgacttcaaactatactacaaggctacagtaaccaaaacagcatggtactggtaccaaaacagagatatagatcaatggaacagaacagagccctcagaaataatgcttcatatctacaactatctgatctttgacaaacctgagaaaaacaagcaatggggaaaggattccctatttaataaatggtgctgggaaaactggctagcgacatgtagaaagctgaaactggatcccttccttacactttatacaaaaattaattcaagatggattaaagacttaaacgttagacctaaaaccataacaaccctagaagaaaacctaggcattaccattcaggacataggcatgggcaaggacttcatgtctaaaacaccaaaagcaatggcaacaaaagccaaaattgacaaatgggatctaattaaactaaagaacttctgcacagcaaaagaaactaccatcagagtgaacaggcaacctacaaaatgggagaaaattttcgcaacctactcatctgacaaagggctaatatccagaatctacaatgaactcaaacaaatttacaagaaaaaaacaaccccatcaaaagtgggcgaaggacatgaacagacacttctcaaaagaagacatttatgcagccaaaaaacacatgagaaaatgctcaccatcactggccatcagagaaatgcaaatcaaaaccacaatgagataccatctcacaccagttagaatggcaatcattaaaaagtcaggaaacaacaggtgctggagaggatgtggagaaataggaacacttttacactgttgatgggaatgtaaactagttcaaccattgtggaaggcagtgtggcgattcctcagggatctagaactagaaataccatttgacccagccatctcattactgggtatatacccaaaggactataaatcatgctgctataaagacacatgcacacgtatctttattgcagcactattcacagtagcaaagacttggaaccaacccaaatgtccaacaatgatagactggattaagaaaatgtggcacatatataccatggaatactatgcagccacaaaaaataatgagttcatgtcctttgtagggacatggatgaaattggaaatcatcattctcagtaaagtatcacaagaaccaaaaaaccaaacgctgcatattctcactcataggtgggaactgaacaatgagaacacatggacacaggaaggggaacatcgcactctggggactgttgtggggtggggggtggggggagggatagcattaggagatatacctaatgctaaatgacgagttaatgggtacagcacaccagcatggcacatgtatacatatgtaactaacctgcacattgtgcacatgtaccctaaaacttaaagtataataataattaaaaaaaacatatttctgttgcagaagcaggcaaataaatctctgctagaacagacagaccaaatatagagacaaatatatacataactttagtaggacaggcttataagccagttaaaaagggatagaaaattgtgttaggacaattagatttccacacagaaaaaaaaaaaagtgctgtatacccctatctcctatcatatacagaaataaactccagctagattaaagatgtaggtaaaaagccagcctattgcaagataagagtgacaccatttcaaagcaaaaccaccataatgacaggagtttggctccagcagcaaggtctttaaacaatgcctgtagcatagacaacccctcataaagatgtttatctaacctctccagtggtcatgagtagcaacaaagtctgaggtgtaaccagctgcatatgttttaccaaaaaagcttgctatataaaggatattttcgggagggtggatgtgggaatacaccacctcttggccacccaaaacattatttctgtttgttagtctgtaataaatgtttttttataagaaactggatttgtcagtgtctttcttcagctctcagctcccttagcctttgggggtagctttgcatatgtttgctcatagcagaacagaactgctaataacaaaacttgtactatttgaaagagttccacttctggtagtgataaactagataattcagaccactctcctgcttaaagaactaaaatgtctggagaaaatacatttaaaagtctatgttaaggctaatgaagacacacgagcagtgtattttgtctgaaaacaaaatattaaaaaaagaaaaaagaagaggtaagcctagcaataagggctgcttttccccaagaggcatctatcaattatggaacagaggccaagaggctaataagcagagcagaccttttgactgacttacaagatgagaaggtcaaagactggaaatcaaaacctaccgagaaactgagaagccctataatgccaaaggaccatatcctagatgtaaaggaggatcaaccctcaaaagtacagtcatgtgtcacctgacaacatggatacattctgaaagacatcattaggcaacttcatcattgtgtgaacatcacagagtgtgtttacacaaacctagatggtatagcctattgctcctaggctacaaacctgtgtagcatgttaccgtacagaatgctgtaggcagcagcaacacaatggtaagtattcgtgtatctaaacacatctaaacatagaaaaagtacagtaaaaatacgatactataatcttatgggaccacaattctacatgcagtccatcattgatagaaacatcattatgtagcacataactgtactgaagcccagattcaaattatctctaaccccaattgaattaagtgatccaggattgctagttctagccaccagatagaaacaaaaaccttaagtaaaatacgtcaacattcagaagttcaaataacctctatcacgttttacgcaatgtctagcactctatcaaagatcacaaggcacagacaaaaacaataaaaaacaagagaaacaatataaaatagaaagagacccacaggagattaacatttaaaagattagcagacagaattagactataattaatatgttctaggatatgagcctaggcagcgaagtgagaccctatctcttcaaaaaatcaaaaaaattagccaggcatggtaccacacgactgtggttccagctactcaggaggctgaagtgggaagatcacttgagcccaggaggccggggctatagtgagccatgatcacaccactgcactacagcctgagtgacagagcaagaccctgtctcaaaaataaaaataaaaaataaaaataaattatgttcttggatataaaatacaagatttctggataatatctttaaaaggctaaaaggaatcactaacctagaattctttacccagcaaatatactgttcagaagtgaagtgagggtcagacatggtggctcacatcagtaatcccagcactatgggaagccaaggcaggagaattgcttgagaccaggagttgaagaccagcctgggcaatatagccagaccccatctctacaaaataaaattgttttaattagccaggcatgatggcatgctcctgaagtcctagttactcaggaggctaaggctggaggatcgcttgagcccaggaattcaaggttgcagtgaactgtgatcacaccactgcattctagcctgggcaaaagagcgagaacctgtctcagaaaaaggaaaaaagaaaacatgaagtaaaataacaacattttcaccaaaaaaaaaaaaaaaaaagacattatcatcatacccaccacacataaggaaatactaacagatattcttcagacaactgagaaacacagaaagaaataaagaacaataaaaagcataaatatatgagtaaatataaacatttgcaatacaaaataagaataacaatataaaataacaagaattccatgtgctatttaaaatgtatacagaatttaaagaaacaaagcagatcacaaaaaaaacaacagaccatacaagctcttaaaaacaaattgccatattcttaggaaaagattgtttcatgaccatgaaaacaattactagagtgagttttacacctgtttaatcaaagacgactgttagactcgtcaaatttttgaaagccagtcagtcagtaatagtcatgcttctgaaattcagacaatcaagagttaacactctagtgaacaaaggcctacaacatccagatattttttaaataggatgttacgtatctttatattattaaccttaacaataatggtactctttttggataataaataaatgaagaaaaatgtccttgcactagaaaagaaagatacaaatattcttgagacttaataggagctgtcatcaaggcaacactcagaaacaatatacctacagctcctgatcaatctcttgtgcagctctgggttccttttcatatatggaaattagactcttaccatgccatcccagaacccagggtacctgttgtgtgagcgtaacaactatgttattccaagtgtacaactccccaacatgctcagtggactgtgtcttataacaaagaatatgaatggataaaatctttcctttgataactgacaaagagttttctgaagataatgatctgatccatacctatctttaagaactatagtatgtcttcacagttgtaattattggcaacaagcattaaacttcttggatcaaatacttcatatctactcaaaattgtaacattaacacttaaaactaagaaaatagagatgtttaaaattttccatttcacacactacttcatattcctacctgataactttaaataccaaatgcactgagtttagccctgaaatgagtttaaaacaattctctaactgggatataattactttccactgaagcatttttctgccactcaagaatcatctgatttacataaatgctagttaagcaccatagaaattctaaaatatatcattagcagaatgtcacagatcacttaatctactctgtcaaaacagggattatttcaacttctgtttcacttcccttaaaagaaatcctatttactttcttttctctaacagggaaaaaaaattagtaaaataaacttacagtgtacttcccaaatcaaactttaaaatgattctggttaactacaaattgactgaagtattttttctgaatgtattttactgaaacatggctgacaacatataataatgttactgctacagaattacaaattatttcactgattactcttcctattcaagaaaaaaaggtcactttggtccatacaaattgtccaaataaactagatgtattactagcttaaagtaaacaattttgtaaatagcacttctagttagagttaaaacataaccataaaaagcttttattaaacaatacatttcactaagctaaatttatagaaatatatatatttctatcactttcacacatcctgacaatatttgggaaaataaatacaaaaatgtttttttttaattcagaagtatataatttcttcaaatattccagccataaattataatacataaaatttaagatacgtaaataccatgaatattataaactttaaataaaattctagccataatttatgaaactcacattattaaacaacacacacacacgctgattccaaatgaagaagagaagtaccatggtagtttctctgtgacacaccaaaaattatcctaataaataaattaaacaatcatgtaattcctaaatttgttacagaaagatatgtggctggttctcacacctcctactagatatctttacaccacttaaaaccttttcttttttcatgctattattttctgtgtaacaaaataccaactagtcagattctaaaatatcaatctttagaaatgatattagcaaaacaattttaaaatacttactgtcttgtttcgtaatctaattatgtctgagacagagccagcgccacagtactccataacaatccagaggtctgtattcttaaaataactgccatagtactttacaacatatgggctaaaggaaaatacataaacaattaaatttagttaattcccaaagaaatttttttcttaatcccaatacaaagtattttcaacatttcatactgttccaataagttaaataagtaaatttctattgcacatcaaattctcaatatctggagttcaccaactatgcataattaggctttacttcatggacgaaatttaacaggattacaaaccagaagaggcccaaatgttttgagtgattctgaagaaaataagacttcattttggcaaagaacttactacttaacatgaggaacaaatgaaaatttttccctttaactaaagcattttaaatatgtcttctaaaggattttgcattcagtcaaatattaatcaactcgaaaataatctatatttccatgaggccaaaaagttattttaaattttctttcattctggcttttgaaaattctagagaaaaaaaattataaatttttctgcttaaatttatagaattaaaatattagcaatttaatttctaaactgaggtcttacgtcttccagagcagaataaactatgtttatagccaagctgtcttcaggaagatttagaaagggacaaatgaccatcagcaataatgtatattatggataaactacatatagtgatgtatgagaaatctaacctatctcaaagaggcagaatatcatattcaaaaaatgcatagagatagaaaatacaagacagcagaaactaaataggacacaactttaatgctacaagagctcaaatgaggaaataacattggaatcatccaaagagaactttgtggaagggagtgggatttgaatgagattttgaaagaaaagtttaaactccaaaatgtagatggagaagagggataagaaaattctagaaaagagaaagaccatgaataaaggtacacaaatagaaagggaaaaaccaagtatggcatgtaagaggacaacttgttcaaataaatacttctatctagtaatagctacaatcaaaaacagtagccattttgctgggcacaaatgtaagataaatatgacagaaaaacaaataagcaaaaaaaaaaaaaattgaaagtacaataaaagaacacgtagagactctatcaattgtggaggttaagagaagactgtcagggaagacttctcagtacagcctttaaaattttagctatgctctaacactgaggcagtaataaacagcctaccatccaaaaaaaaaaaccacccaggaccagatggacttagggccaaattctagcagatgtacaaagaagagctggtaccatccctgctgaaactatttcaaaaaattgaggagaaggaaatgctccctaactcatcctatgaagccagcatcattctgataccaaaacctggcagagatacaacaaaaaaagaaaactttaggccaatatccttgatgaacattgatgcaaaagtcgtcaacaaaacattagcaaaccaaatccagtggcacataaaaaacctaactcaccacagtcaagtaggctttctctttgggatgcaagattggttcaacatatacaaatcaataaatgtgattcatcatataaacagaactaaagacaaaaaccacatgattatctcaatagatacagaaaaggctttcgataaaatcagacatccattcatgttaaaaactctcaacaaactaggtattgaaggaacatacctcaaaataataagagccatatatgaaaaacccacagccaacaatcatactgaatgggcataagctggaagcattccccttgaaaagcggcattaagacaaggatggactctctcaccattcctgtttaacatagtattggaagtcctggcaagggcaatcaggcaagagaaagaaataaaggtcatccaaataggaagagaggaagtcaaactacccctgtttgcagatgacatgatcctgtatctagaaaaccccatagcctcagcccaaaagcttctcaggctgataagcaacttcagcaaagtctcaggatacaaaagcaatgtgcaaaaatccctagcattcctatataccaacaacagtcaagccgagagccaaatcgggaactaactcccattcacaactgccacaaaaagaataaactacataggaagacagcaaactagggaggtgaaagatctccacaaagagaactacaaaacactgctcaaagaaatcagagatgacataaagaaatgggaaaacattccatgctcagggatagaaataatcaatatcattaaaatgaggctgggcactgtggctcacgcctgtaaacccagcactttgagaggatcacttgaggtcaggagtttcagatcagcctggccaacacggtgaaacccccatctctactacaaatacaaaattagctgggcatggtggcgcatgcctgtaatcccagttacttaggagggtgaggcaggaaaatcacttgaactcaggaggcggaggttgcagtgagctgagattgtgtcactgcactccagcctgggcaacagagcaagactccatctcaaaaaaataataataaaaaataaaaaaataatatataaacacacacacacaaacacacatcattaaaatggccatactgcccaaagtaatttatagattcaatgctattcttactaaaactactatttgagattcggcacagaactagaaaaaactattttgaaattcatatggaaccaaaaaagagcccgaatagccaaggcaatcctaagcaaaaagaacaaagctggtggcatcacactacccgacttcaaaatacactacagggctacagtaaccaaaacagcatggttatgatacaaaaaaagacatacagacaaatgaaacagaataaagaactcagaaataagaccacacaactacaactatatgatctttgacaaacctgacaataacaggcaatggaaaggaaaaaggattccccattcaataaatggtgctgggataaccagctagccatatgcggaagattgaaactggacccctcccttattatcatgttcaaaaatttaactcaagatggattaaaggcctaaatgtaaaacccaaaaatataaaaaccctggaagacaacctaggcaataccatccaggacataggcaaagatttcacgacaaagacacccaaagcaatcacaacaaaagcaaaaattggcaaatgggatctagtaaaatcaaagagcttctgtacagcaaaagaaactatcaagagagtaaatagataacttacaaaatgaaagaacatttttgaacaaactatgcatccaataaaggtctaatatccagcagctataaggaacttaaacagatctacaagaaaaaaaaaacaaacaaccccattaaaaaatgggcaaaggacatgaacagatacttttcaaaagaagacctacatgtggccagcaagaatatgaaaaaaagttcaacatcactgatcattacagaaatgcaaatcaaaaccacaatgagataccatgttacaccagtcagaatgactattattaaaaagtcaaaaaaaaaaaaacagatgctggcaaggttgtgaagaaaaaggaatgcttatatactgttggtgggagtgtaaattagttcaaccattgtggaagatagtgtggcaattcctcaaagacctagagacctagagacagaaataccattcaacctagcaatctcattactggatatatacccaaaggaatataaattgttctattataaagacacatgcatgcttatgttctttgtaactagcactcttcataatagcaaagacatggcatcaacctaaatgcccatcaatgatagactggataatgaaaatgtggtacatatacacaatggaatactatgcagccacaaaaaagaacaaagtcatgtcctttgcagagacatggatggagctggaggctattgtccttagcaaactaacacaggaacagaaaaccaaatactgcatgttctcacttataactgggagctaaatgatgaggacacatggacacacagagtgaacaacacacactggggcctatcagaaggtggaaggtggaaggagggagaggatcaggaaaaataactaatgggtactaggcttaatacctgggtgataaaataatctgcacaacaaacccccatgacacaagtttacccatgtaacaaacctgcacatgtacctctgaacttaaaataaaagttaaaaataaataaataaataaataataaaaacatcagtcatctaaaaaacaaaagtttaaaattttcccattataattaaattttatattaaaaacaaaggcaataaatacaaaaaaaaataactatgtcttgaagtcaaaggtagaacagagtggttggagctgaagggcctgaattcaaacctgttttatccccactgctactccgttacctcttgcacagacttgctccccactggtctccttgtcttagttttctcccctgttctagtctatgctacatacagttgacaaggtaccttactttaaaacaaaagtaaaacaagctgatcatactgctctcctagttaaacaaaaatactctaacagctctccattacccaaaggaaaagctcttaactgcttcatatcgcatacaagttatttcagagtctaccttgttacccgtatctctgattactctccatctcataccttaaatttccagacacactcagctttgctaggtcttgggaattgaaagtatgtatttggagttcataaatgttcactgaaccatttaagaaaagtgcttgtttacaaacaaatgaaactaaatacagacttagaactgcaacatatgagaaacaaaaaaaaaaattctttacatgtactcctttaaggtatggcgcctatgtggaaacttttatagggagtagcgttcctacacctggctgtgcatgagagccacctgtgacccaagcccacactcctttgaggttctgattcagtaggtttttaaaagctctaccggtgactctgacatagacccagagttaagcttcactctaccagtgaatagactgtatatccttcaggggaaaaaaaaaaaactctctctctctctctttttttttctgaagcagaatctcattctgccacctaggctggagtgcagtggcaccatgtcggctcacagcaatgtctgcctcctgggttcgagtgattctcgtgcctcaacctcccaagtagctgggattacaggcctgtgtcaccacgcccagctaatttttgtagttttggtagagatggggttttgccatgttgaccaggcttgtcttgaactcctggcctcatgtgttctgcctgcctcagcttccaaaagtgctgagactataggtgtgaaccaccatgcccgccaaaaaaaaattctttaaatatgaatgttctcattcaaaattttgaaaagtgttaagtaacaatgaattgacgattatgttcactgaaaagcatacaaaaaaatgtacatttttcttgccatacacactaatcagcaatgctaagggtagaagtgacaactcatgaaaattaggaattctaacctgggcagccacctgaaaacacagccctatctctccataagagtaagtcaagagaaaactttggcaaaacgtaaaattctcttcaaaaaaataattcatggcccatctaacacccacgtaagtagatggatccaagtccaacacctctataacataaaacatggcctcactaactttaacccagcaaagtatttaagcaactagaactaaacagccacatgcattcactgaccctctactcgggccaggcatttcaccagatgttcagtatgcactagtgaaacacacattcacaatttggaccctcataccgaatacactagcatgaatatacaggaattaaggaagtaaactcacaaataaatatgattactaaccatggcaagaaaagaagaaagggtgctataagataaactggctgtgactttattttgtattcaccatttctgcaaataaaattgctcctagttcatatgaaggaatggaatgcattcatattccatggtagcctctgagacttggaaggcactggagtatgtgaaaaacctttgaaagcagataagtgagctttaacaataaaatgtcctttctccactgaactgctgtgaattacaaaatccacagattggaaaagaaagaaatgcttaaactccagagttcatatgtatacagtggccatcctctgacactttctaagtcagcaccttttatactgtaaagcacttattacatcctgcaaggactttgtcattgacttttatctgcctcccccagaagaacagaagctccataaagataggtaccaatctgtctcgctttccattttatcctcagtagctctcttctcctatatacaaactaaagaagcaggccgggcacggtggctcatgcctgtaatcccagcactttgggaggccgaggcaggcgaatcatgaggtcaagagatcgagaccatcctggccaacatggtgaaaccctgtctctactaaaaatacaaaaaaaattagctgggcgtggtggcaggggcctataatcccagctactcaggaggctggggcaggagaatcgcttgaacccgggaggcagaggttgcagagagacgagatcgtgccactgcactcctgcctggcagaagagtgaggctccgcctcaaaaaaaaaaagaaaaattaaaattaaaaaataaagaaagaaagaaaagaaccaacgaataaataaatcacacaaaaaactaagacaggacctaatttaggactctccaagggaataatatttaagctaagatgcaaaacttaacgagaagttagccagataactaagcactaagaactgccctgcaaaggccctgaaagacagaacaaatcacggtcaaagaactgaaagattagcgggcccaggataaagtgagtaaaggatacagtagaacataatggagttgcatatgtaggcagaagcctgaccatgaagggcctcaaaaccaaggtaaagagactgggctttatttgaaatacagaaaaaaaaatcagtgaagaattttaagcagacgaataacatgatgtaaagtttctgtggttgctgaatgaaagctagattgtagggaagcaaatgtgaatacagagagaccaattaaaaagtaatgttagtccatgcagagattatagtaagcatatctttttattttctgtattcttgatgctttggtatctgggaccttgctaaaactgaagcgactgcccctctcagggtaagctaattcctagagacagcaaactaactcccatggaaggatgtctttcatatgcacaccaacctatctaaagcccaaacctccaaccacctctatggttacactctagggtcaacttttcacctgcccaaattgccccagggccaggtaccagacaaccagagaaagccctatgccccagaacccactcaaaatactcaaagtagccaatcctaaacctgtttaccctatctcacctgtcccttcccagggaaaccacacaaacattcttgtccacttcttcccccctctttctctgcctcctaactgactctggtacttccccgtggagcccctgtgacacagcacgcctccttctcttgtgagctgtatatataacaatatatcttttccatagcaatagtctcttgatctgttggcctcatgatatgtgagtaataataaagcatactttttttttttgagacagagtctcgctctgtcgcccaggctagagtgcattggcgcgatctcggctcactgcaacctctgcctcccgggttcaagcgattcgcctgcctcagcctcctgagtagctgggattacaggcacccgccaccatgcccggctaatttttgtatttagtagagatggggtttcaccaggtcaggagttcgagaccagcctgaccaacatggtgaaaccctgtctctactaaagatataaaaaattagccgggcctggtggcatgcacctgtaatcccagctactcaggaggctgaggcaggagaatctcttgaacccgggaggcagaggttgcagtgagccgaggtcgcgccattgcattccagcctgggcaacagggcgagactccatctcaaagaaaaaaaaaaaaaaaaaagcctaccaataggctcagacagttcaagacctgagacttctaaactcaagtctatttccattaacacagatatgcattcaaattcacatttatttatctttttttttaagtaattcaaacaacaaatattcactgaacaagcctactagcagaagctagggagaaaaatggaaaaacattagactagtgacaaagaagaaagggcagtccaggcaatggggaacccctgaagaaatttatataaggaaataatacaatcaaactagcatttaaacattatcctgagcaggattgtcaaggatcaaacatgatgttgttcattctagccagcaagttaactaactacaattatttagatgttctaacatctgtttttaaaccagcatgttgattattaaaggttagggaagaaggggagagagtttcactcaaaacactgtaacactctagtgttatatacaggcaaatctataagatattgcaggtttgattccagaccacctggataaagcaaatatcacaatacagtgagtcacacaaatttttgttttccagaaagaaaccttggatcaggcagattcatagctgaattttgctaaacgtataaagatgagctggtaccaatcctactgaaactattgcaagaaagctgaggaagagagactcctccctaactcattctacgaggccagcatcattctgataccaaaatgtggcagagacaaaatgaaaaagaaaacttcagaccaatatctctgatggacataaatgcaaaaattctcaataaaagacctgcagaccaaatgcagcagtacatcaaaaaactaatccaccacgatcaagtaggctttattgctgggatgtaaggttggttcaatatacacaaatgaataaatgtgatttgccacataaacagaggagattttgcaaaattcttgagggtcctaagatttttggaatgggcaatgaacactggcttcaacttaaagtcatgagaggcatcagcccctaacaagagagtcagcctgtcctttgaagctaagcagtgacttctctctagctaggaaagtcctagatggcatctccttccagtagaaggctgtttcgtctacattgaaaatctgttgcttaatgtagccaccttcatcaattatctcagctacatcttctggataacttgctgcagcttctatttcagcacttgctgcttcatcttgcacttttatgttatggagacagcttctttgtttaagcctcatgaaccaacctctgctagcttcaaacttttgttgcttcctcacgtctctcaaccttcatagaattgaagacagtaagggcattgctcgagattaggctttggcttaagagaatgctgtggctggtttgaacttctatccagaccactcaaactgtctccatatcagcaatgaggctcttccactttcttaccactcatgtgctcactggagtagcacttctaatttccttcaacaacctgtcctttgcattcaagcttggctagctgtttggcacaagaaccctagctttcagcttatttcggctttcaacctgtcttcctcactaagctaaatcatttctagcttttttatttaaagtgagagttgtgtgactctccctttcacttgaacccttacggaccattgtagaattactaattggcctaatttcaatattgtgtctcaaggaataggaaagcctgaggaaaggaagggagatggggcccacggcctagcagtgggacagtcagaacacacacgacatttatcaatttagttcaccatcttacaaaggtgcagttcgtggcacctcaaaacaattacaacagtaacatcaaagatcactgatcacagatcaccataacagatataataataatgaaaacgtctgaaatatgggaaggattaccaaaacatgacatagagacatgaagcaagcacaaactattggaaaaatggtgctgacggacttgatttgctcagtacagttgccacaaaccttcaattaaaaaaaaaaaatgcagcatctgcaaagtgaagaagtacaacagagtaaggtatacctgtatataaattttaagcaatgcagaaagttttaattcagccatatgcctaagaattttgactaagccagtatatggacttgcaggttgtatcagaacccagcaattctatacacagtcatccctcaatatccatggcgaactggttccaggaaccccacagataccaaaatccatgaatgcacaagttccttatattaaatggcacagtatttgcatataactacatacatcctccagtatactttaaatcatgtctagattacttattacacctaatacaatgtaaatgctatccaaataattgttatactgcattggtttttttttttattgtttttttctattgctttttttctcccaatatttccaacatgcagttagctgaatctgtggatgcagaacaagcaggatacagagggctaactgtagttttgttacattttttatttttattttttaagagacagggtatcactctgtcacccacgctagagtgcagtggcacaatcatagctcactgtagcttcaaactcttgggctcaagtgatccttccacctcagcttcccaagtaaccgcaactataaacatgcacacacccggactaattttttttattttttgtacagacagggtctcactacgttatccaggctgctctcaaattcctggcttcaagtgaccctcctgctttggcctcccaaagcactggaattacaggcgtgagccactgtgcctggctagttttgtctcttttaaagaggagtaagcagctatgtctttgaaaatttcactgggtggaagaaccaggaaaacacaaaggaaattacagactacaccaggaagcagaggtgaaatatgatgccttaataactagcatgccaatcatgagccacattctatgcctttctcttatgcatcttctctccatttcatcctcctgtctcattaattttttccttcccctatttaacgccttcaatccaataaaatgacgtatcttgttctcgttttcttttttttgagggggtggggggcttctgggcttcctctcatctcatacctaatgatcacatcctttccatttccatcttcactttacagctccctacactctttatcctaatggtcctcctctagtatcacaactcaaaatagaaagagtattaaaaaaaaatgagaaaaaccaaaggggaaaaatggaaaaaggactacatactcctatctaattgtaccttacttaaacactatgcatgatacaaattatacggactgaatcattacgtttaagcttcttataaaaatccaaatgttctattcataacacccaaaatatggaatcaatctaagtgtccatcaacaacatcatataattaaataaagaaaatggaatactatttgaaaatactgcttgaaaggtgactttttctttttttttttttttgagacagggtctggctctatcacccaggctggagtgcagtggcatgatctcaggtcattgtaacctctgcttcctgggctcaagcaatcctcccaacctcagcctcccaagtagctgggactacaggcacgtgccaccatgcctggtgaatttttgtattttttttagagagagagttttgccatgttgttcaggctggtcttgaactcctgagttcaagcaatctgcccacctcggcctcccaaagtgcaaggattataggcatgagccaccacatacaatcaaaaggtgactttttaaatagtaacttgaatttcattctaattgaagaaaaccatatatagctaaaggtatactttttaaaagtcttcctaatatgagcatgtgataattaaaatactaaagaaatggctatttttaattacatcattttcatcaacatcttactataatcttagtagtgttctataacttagtatggtaatacagtgtttttacaaaggcaatgtggatattctattaaaactgagctgtttccagcataaatctcaatcacacagcaatttatttcttggcccacccaaaactgaatatacaaattgccaaagttcaaattgctgatacaaattgccaaagttcatcaataatcctccaacatggtgattttgaaacttttgattttttatttatttatttatttatttatttgcctcagaaacagtgttcaaatggaatcttatctagaaacatgaggaaatagaacaggtaagaatgtagaatactctggtagaagccaaggggtgctcagtgacaccctgaacaggccagctgaaaatgctctatttcaccataagagttatctcttctctttgcccagcaaatctaactcatcaatcaggactcagctgaggtatgacctccctgggaaaactttccctgaacctccaaacatgaggtgttagatatctcttccaacccacatacttccccatatctatcccatcacagctgttaccacactgtgtactgaaacagcctacccattcgtctgtttcttccagctgagtgaaagtctctctaaagcctcaaacccattcttttttgtttcttttttttgttttgttttgtttttgagatggagtctcactctgtcacccagactggagtgcaatggcacagtcttggctcactgcaacctctacctctcgggttcaagtgattctcctgcctcagcctccccagtagctgggattacaggtgcctgccaccacgctcagctaatttttgtatttttagtagagacggggtttcaccatgtttgccaggctggtctcaaacttctgaccttgtgatccacccgcctcagcctcccaaagtgctgggattacaggcgtgagccatggcacccggccgagacccattctttgttgtatctcttgtgagagcacatcaggcctacacttaggagtaggtggtactcaatacatactagttgaacaggtaaaaaggggataagtgtgtgccctgattcataacaacatatttatctttgtttagatatgaaaagttccttctctgcatataagcaccaggagggtagggactatgtcagttgtgattaccttgtgtacatattacctgccacatagtattgctaaccagctgttgcctctactcctaggaatgccttgagagtgcttcactttgaactgttggaatctttttacaggcattgctttcttcaacactggccctgaagtagggtaaatgtgggttcttattgcatctcagtcactaactagcagtgtgattttgggcaattcatgtaaaagctctaggtctcattttctgtatctgcaaaattgtttttaaatatgctttagcactagaagacttttcctcaaataaaaatttcaaaagagtcccatatataaaaaagataaaagcaataatgaggttctcattctactcaattcttcagtgaagaaaatgcccctagaagtaccttcttagagcagggtatgatttgaaaacactaaactagctgacccacagaagttgaatctagcactaatattctatgatttatccatttaataaatactcattaaatgtatactctgtacctggtactgaactaggcactgcacattcagcaataaacaaagcagatgggctccctgagatatttatgctaacatgtagtattcagcccattattaaatattcacttaaaatgaacaaaaaaagattaaaacaccacctctggtccttttatagagtatagaaaacaagacaatttaccaaattcacaaatagctgaatgtattaagaaaatagttaaatttcagaaatgcatatctcattttccctatcaaaatttcagtgtattatttgggaatttttcaattcatactgttttcttccaatcatttttatgctaatttcttaataacacatttacattaatactagttattggtagctaaaatctaagtttctccctgtcatttcctaattgtttttctttttcttttttttttctttttgagacagagtctcactctgtcacccaggctggagttcagtggtacaatctcagctcactgcaccttccgccttccaggttaaagtgattctcctgcctcagcctcccaagtagttagaattacagtcacctgccaccacgtccagctaatttttatatctatttagtagaaatggagttttgccatgttggccaggctggtgttgaactcctgacctcagatgatccacccacctccgcctcccaaagtgctgagattacaggcgtgagccaccatgcccggccctaatttattttttactagtcctatcttttagcattttaggatcttttaaccaactaattttttgatccttcgcaacttcatacttacaatatgaatttgacagtaaaatcttaaaaggcagaaaccatttttcatcaatatttgcctcagcatttatttcattcaacaaatatttgagaagtacctactatgtgcaaggcattctgctataaagtggtacaaaagttctagaattctataacatttccttctcattgtattctttacttttctttccctttaaaagcttaaagtgcataacaagaataagtacctgatttccctggggttccctcaatctgtaatgctcttccttgtactcctcatacataccacaccctttcattcattcatcaaaaagtatactgctaggcgctgaacaggtgctaataaagaaaaatatatggttcctttccttaaggaatgaagagaagaataaagatagtgatgacatttcagaaggaaaatctacaagactcagtatcatctgaagtatcataaaaaggaataaagatgattctcagccttgctaaaagactaagtagatgatgatgcctttgatacacaggaatttgaaaggcttgtctggaatgtttaaaactggttttagaatgttaaatgtgtaattccctctggatagtctagttgagttgcccaaacagaaattattaaatagaagtactcattagtatctgagtaaccattatgtggcaggatccaaggacactgagtaaaatacaatccccgaactcaaggaacttaagacttagatgatagagaatacaagtaaacaggcacttaaaagagaaactcaggtaagagactggaggtgtaagcactagatggaacatgaaggaccttgtatgccactcttaggagactggatttctcgaggcaatggggaaccatgggttttaaacagggaatgcttgattacatttgcattttggaaagaacgctctagcttcaaggaagataatgggttggaggaggcaaacaaagtgaacaaataagatgctgttgcagaaatctgaacaagatttgagggaagagatatgtaatagtaatatttgagaccctgactttcctagacaacactcaaagtacaatgctaatccttgaactatttttaaccataataacaaaataatactcgcatcaggcaagtataaagcatacctggtggccgagcactatgctatctcatctcttattctatatcaaattgtgggaaccacagttgaggaatgtatctttttttttcctataaccacttgaatttcacatgctatgggaaatatgtaacataatttaaatatacagcatattctaaagaaaagcaaaattgaacagatccaagcagcaaagttcctctaggattatgcaatcacttcattagccaaaaagcttacaatctatagatcctatgtattgttaggagtgaaagctttccataaatctctaattacagggccctgaattgataaggggagacaatgtgcccagactaccctgtgtcaccagctctaagtcacacgagacaatttttacaaataagactgaagttgaaggtttctgggaaagccccttccctgcttcttcttttcttcctcctgcctggaatgtagacataaagctggggctgtagcagccctgttgtagccatgagataataagcatgaggacaaagcacatgctaacgatgagagagtacaagaaaagaagactgagacatggctgttcctttgttgctgctgtactagcagactttttgttaagggagaataataaatccctctgtggttaagtaactttaggctaaacatagtcataatttatatactctgaatcccttatagaataaagcctaggctacttcacattgcataagatgcttctcaccatcagctccatttaactatccaacctcatttcattctgttctctgtcccatactttccattccaataattctaaatcttgtcagatgagcacaccccaatgagttgtttttacctttctacctgtcatccccttgactctcccttatcactccatttcttcacccaattaactcttcgtcagcattccagatttcctggctccactggctgaggaagatgccctgccttcttcttttcacattaccccatgcaccagtcactacaatgagtgtgctatattacagctatttatttatatatttgtcttcccaactacactactgacccctcaaaaagaaaaaagtatcttagttcttttggcattcttagatcctggcacagtaccgggtcaactggggatgctcagtgaatgttgaatgaattagatttacataaaacatgacttcttaattagtaaaagtgattacataatacagactgttaaatgacccctttaacatcaaaaactcattctcatccataaatttgtcctaaaaaagtccaggctatagtgcagtgctgcaatcatagctaactgtggccctgaactcctgggctcaaacaatcctcccgcctcagcttcccaagtagctagaactacaagtccaagctaccacctggataattttttcttttttggtagagaaagggtctcactatgttgctcagactggccttgaactcctgggctcctttaccctcgatgctctggcctctctaagggttgagattacaggcgtgatctaccacatccagcctcatttctgcttttaagcagaaaagctgcaaagagctgtaagtcctaaagacacttgacaaagccatcctcatctgccttaaaggattaatctcacttccaatgggaagtcagaaatgaaaactaggccaggcatggtagctcacgcctgtaatcccagcactttgggaggccaaggcgggtggatcacctgaggtcaggagttcgagatcagcctgaccaacatggagaaacccatctctactaaaaatacaaaattagccaggcatggtggcacatgactgtaatcccagatactcagggggctgaggcaggagaatcgcttgaacccagaaagcggaggttgtggtgagccgagatggcgccattgcactccagcctgggcaacaacggcaaaaccctgtctcaaaaaaaagaaaagaaaaagaaatgaaaactaaacagatgatcaaagaataaattttgttatattttattagcaaaactcgtcaaaacaagggtaagcaaagaaataaaatctcttcatacctgtcacattgctgcattatggaaatttctttgattatttcctgaagatctgattcaacaggtacttgtttaattgcgacaacttgaccggattccttgtgtattgctttaaatacacttccataagacctaaaagaaaccaagacattatttttttcctatcaaacatcgtaactataagattaaaagtctactatgagttttctgtggatagtcttttctagtttaaaacactatttaaatgattaaaaaatcaaagtaaacaagtaacaattttaaaaggtaatgaattatatcttagctttattgcttcaactacagacttaaaatagtcaagttaacatataatgagtagctatttttcttatgaatgaaagaaacagacttgcgtttggtcaactcaaacaaatgcagcattaagaagatataaatggaaattaaaagaatgaaatgtagattaaaaatagccaaagcctcaaattaggagaaaaggctgatctcaaggaaaatgacccccagaatatcaaaaagtcacacttctgttcagagtaccttaacagttaaaaccctcagctggggaccatattaacatcaaagttagagaagcaaggaatctgcagccatctgcttctacctgatttacagatccaaggtctctttttaaaaagttcctttcattaccttttcctcaagagaaaaactacaaactcacaggtaaataaaatgaggaacagggtctaatagtcacttgcccaaaacctgtctctgctacaactcctgaaactttgccaactgaatattcacgtgttttaaaaagcaaaaacaaagaaggaagaagccatttgtaccttagtatgaacttaaaaacgaggttaaacactactatgtactgagttcttactataaaccaggtcctatgctaggtgttttacatgcattatgaaattcaaccctcacaatcataaggaaaaacactattatcgtcattaaaagatgagaaacagaccagtagggccagaattcaaacacattcccaccccaaaaatcaggtttttctcaccatatttttctacagaagagaaacaagagcaagccaatggaaaacatcgaatgtttcctaatattagaaatctatgcagaagcccttccaaatttataatcttttaaaataagtgaaaaagagacaaataagtgataacgcggctacttcaataaaatacattttatcctctcctctgtttctttgggctctctgaagtcatttaatttggtttggtacccaaagtcacattgggctgggtgtgggggaatgtatgtgtgtgtatctccccttgaaagccatatgtgtgtatgtgtgtatattccctcaaaagctaacatagaattcagtgctagatcatctactgtcaattaggcaacaccatcactcctttctaaggactcctcagcactacgaaagagaagctgcaatccccacttcccagaatccccttccctgaatggttcctcattaaaagtctgccagtgagaaaaacacgtatgtgtgaatgacgaaaggagaaaccatttttctccagatacagttgtagcagatggactgacagatatgaagtgcacagcagcttcctgctgagcttccaacagccaccactgctgcagactgaggtagttggtgggagtttctcaagactgcaggattccagcagattcccagagagcttttgagaaacacccacttcagtgcttcaggctgagatcttcaatgctgacttcgaccttcaacctttggcaacagttttcatgaactttgcatccctggcccctccacaattcatttgagctcctaacttcattactaaattcttcatatctatagagtacatacagtagcttatcttttccttgatagcaatatagtttttggtagaagaagtgtttccaagggaaagaatcttaaagatgagaatcttgaattagttctttcttagatgttgatatggtttggctatgtcccacccgaatctcatcttgtagctcccataattcccacctgttgtggtagggactcagtgggagatgactgaatcatgggggcaggtctttcccatgctgttctcatgatagtgaatgggtctcacaagatctgatggttttaaaaatgggagtttgtctgcacaagctctctctttgcccgctgccatccatgtacgatgtgacctgatcttccttgccttccaccatgattgtgaggcctccctacccacgtggaactataagtcaattaaacctctttctttcgtaaattgcccagtcccaggtatgtctttaccaacagtgtgaaaacagactaatacagatgtgtagacagtaatgacttcaatacaagtaacaaatagtatactgatggtctatggcattcagtggcaaacagttatttaaattatcacccttagttgcctggagtctaagcaaagctttaaaagaccaagtagctgtatcaatacaatgtatggtgaaaataaagtataaggactatagaatgggctgctgcctctgcctgcactggaaaagttatagaacaaacacagcaagctaaaggcttaaatgtccagctcaagactgagagaaccagaaaacttctgaatttcttaattcttacagaaacagggttgagatttctgaaaaacaaactctaggtatagtcttactggaagttgaattacatttcaagttgaattcacatcagcaccaggtctgttatgttaaagttaaggtatctaacaataaagagaagtacctagagaactggtattaggacatttagatagattctcattaatctgagtaccttgaatccccaaatcctatcaagcctcccttgataccaaaagcaactctgccctcctgtctgagaaaattaaccttacaatgcctgaagactctatctacctcctgaggcagtcacttttcagcagcatgcagtggtcctccagaccactccaccaccacttattgcttccagacccaaagttatactcaactcccatagacaccagggagacaagtataaaatttaacccaagcagctactattcacactaaaaaagttgcaagattttgccaatttttatcagaaccctaaagaatatgtgtgagaacaaattctaagatttccagagaggaagaaatgtactgatatggatgcaagaccagaaattccagactcagcatgttagctcaaacagttgggggtgtccctaacagttgctcagccagttaactgaaacctggactcaaaagtggcccatattaagtgagatgctaagtgagcctcagtacacaccaaaggaagcatatcaaaggctcaaggaaatgggatactagaatggatatatattataagtgccatgctcacatactccctaactatgttgacaaaaagggtccagaggataccagcatcgaccaaagctctattagtgcaggggaaagatgacaaatatgccaacagtgaaactggctccttgagtttaatagataacaggatcccagcacaagagaagtggcaacagctattcacctgagacaaagtgggaacagttaccataatgagtaacaaagcaaggctgaattacagttttcttttattgtacatttaggtcttgatattaaagttacactagcttcatttaaaaaaaaactataattaactgtcctttaaacactgtataaaacagtgtttaatacagtggaacctttctggaggggaggaggtgaaatacacacaacataaaattcactgttttaaagtgtatgattcaatggcatttagtgcattcacaatgctgtacaaccattatctgtatgtagttccaaaatatatagaatctgctttctgtctctacagatttatctattctagatacttcatataaatgaaatcatacaatatgtgaccttttatatctggcttcttccttcacttagcataatattttgtaggtccaactacactgtaaaatgtaccagtacttcactactttttatggctaaaaggtcactgtacagacatatcacgttttgtttattcacctgggatagcagatggacatttgagttgtttccacattttggctattgtaaataatatgctatgagttggtacctttataattaacagttatttaatcatttctctatcactggctatatcttccttcttattccaaatcttctgtattttctattttctttagtcaacattgtaagaggtttaattattttactgatctcttcaaaagcttttatatatacaaacatatacgtatctttttttttttgagacagagtcatgctgtgtcacccaggccagagtgcaatggcacaatctcggctcactgcaacctccgcctcctgggttcaagcaattctcctgtctcagccttccaagtagctgggattacaggcacatgccaccacgcccggctaatttttgtatttttagtagagatggctactctactaaatgacaatatggtttcaccatattggtcaagctggtctcgaactcctgacctcaagtgatccacccacctcggcctcccaaaatgctgggattacagcgtgtaagccactgcacctggcccatatttatcatttctaattttttttctatctcattaatttcagctttttctttaattcaatcttcagtttcttttggtatgtttcataatttttctaagttctttaagtaagcactaagtttattttttgcctttctttgttagtctaatgaaagaatttagaactaaaacttttaattagttttgctatattccatagatactggcacaatgtgttctccttttcattgttttataatttataatatcctcttcaatcaatgggttacttcagattatgtttcctaatttctagttggtgtggattttgtcatattataattacttatttctaatttagtgagtataatcagtgatatggtttgcatatttgtcttctccaaatctcattttgaaatgtaatccctaatgttggagatggaacctgttaggagacgtttgggtcacaggggcagtttcctcatggcttggtgctgtccttgagatggtgagttttcacaggatgtgcttatttaaagcggtgtggcaggccgggtgcagtggctcgtgcctgtcatcccaacactttgggaggccgaggtgggaagatcacctgaggtcaggagttcaagaccagcctggccaacattgtgaaacctcatctctactaaaaatatgaaaattagctgggcgtggtggcaggcacctgtaatcccagctactcgggaggttgaggcaacagaatcccttgaacccgggagaaggatgcagtgagccacgatcacgccattgcactccaggctggatgacgagagtgaaactctgtctcaaaaaaattttaaaataaaaaaaaataaaactgcgtggcacctcccctgccctatcttgctcctgctctcaccatgtgagacatctgctccccctttgccttcttccatgactataaccttcctgaagccctcaccagaagcggatgccggcaccgtgctttttgcagtgtctgcagaaccgtgagccaattaaatttttctttataaattacccagcctaaggtatttttcttataacaacacaagaacagcttaatacaatcagaaaatgtgacctgtaaaaatctcttattttttagaatttgtaacttttcttttatcaatggtcctttgaacatacaccagaaaagcaggtctgcaagaatatatatgcatagttatatagacatacaggtactttatatatttttactttatatatatttacatttctataaaatcaagtgtattcatcataatgtttaatccctctatgtcctttctcttttttctattatatctgtccaattctaaaagagatacattgaaatctcccatgcaattatacttttattagatgcctctgacatcactaatagcttttctgtcataaatttagctgccatgttgtctgacatgttttgttataaattgtccttgatattgctacctaatatatctctttatttagttgaaaccttttaaactttaatgtatctaatataaatattgctactattactttctgtttttttatttgtatgtttatctataatatttttataagaaatatccttataggctatgcacagtggcccacacctataatcctaacaatttgggaggccaaggaaggaggatcacttgaggccaggagttgaagaccagcctgggtaacatagcaagatcccatctctattaataataaataaatagccttatatttccattatttgttttacttgcatctcctataaacagaatataggtagatttcgcatgttcatttactctaacagtttgtcttttaatgggaaaattaacatttactgaaaagtacacttgattttattccttccatcatgttcagcttatttttattttttatttatttatttatttatttatttattttttgagacggagcttcgcttgtgttgtccaggctagagtgcaatggcgtgatctcagctcaccacaaccttcaccttccgggttcaagcgattctcctgcctcagcttcccgaatagctgggattacaggcacccgctaccacgcccagctaatttagtatttttagtagacatggggtttctccatgttggtcaagctggtcttgaacttccgacctcaagtgatccacccacctcagcctcccaaagtgctggaattacaggcgtgagccaccgcgaccggcctagcttattattttaccttttcattttctctatttccttgtccttgttcttgctgatctataagcttcttttaattctgttttgtacctttattattttggaaattctcctatactttgccattccattaaatgctccctacctttctctctgctcaaaccggcacgtttctctactgttattttgaaatcatgtcaactattcttctgcctatataaactgtttccctcactaagatattcttgtcatatcaagacaaagactacttaccttttccaaaataaaatgagcctcaagatctaaaaggatggccttatggtcacttgcctaacaaagtcaaaaccttcaaacgtattaataagaatgccgtaagggatgaactaacaaaactcttaaacatcatttcacagcacatttcttgcttttcccttatatatatatatggcctactttctctgaaaaaacactattaccagatttagcacaaactaatctttaaaattcagtatcacctgccaagtttaattactattaaatactattcaattcatacgaatatactctagttgaaagattaacatcatataatattttttaaattgttctgaaattatttacatgctttcatactttttgtacttacccttctccaagcttctctaatacatcaaaaacttcttcaggctgcttagtcaaactgtcttcactcagcttttttagtttactgatttaaaaaagaaagaagaaagaaaatattttctttaaagaccttttacaaaatttttaatttttaaaattttaccaagtttttaattttattttaatatattcagaagactcaaacaatataaaaacatacatagtaaacattctcctttcaagccctgttcctcatgtgcccagcaacacctccaaaaataatcacttttattagttttttgtgaaacctttatataaatatgaatacatattcttaattcctcccctttgaatatataagaagcatatacacacccttctgtataaatattgtcatgttgtctactgttttctcttgacaaaactatgttagagatctttccatacaggttaatcatccataatccaaaaatctgaaatccaaaatgctccaagatctgaaattttttgagcaccaacatgatacccacaatggaaaatgccacacctgacctcatgtaatgagtcacagtcaaactgtaagcacataacacaatttaaggaaaaaagatcctccccagcccccttcagctctgacatatcttttccatgcatgcacagattctcccacccaagcacatccaaagaagggtaataaaatggcacaggtacacgccagacgcaccaatgataggttccccacgatgccccacacggagccaagactgtgcattactcactgtgggtttttttgcttattctctgctttgttggataaagacaatgttgaaaatctgagtaagtgacagaaaaagaggaagcatttatgcttatctctagccaaaaagtcaagctgctggataaactggaaagcagtatgggaaatgtcttacaaaagagcatggtgttggaatgaccaccatatacaacctgaagaaacagaaggataaattgttgaagttctatgctgaagtgtcaatgaacagaagttaatgaaaaatttttcttaattgcagaaaaccaaatgaagatctcaaatgtgtactgaaagagtaaatctgtcagcacggcagagaaaacatactacttaatggtatggtgctcatgaaacaagcaaagatatatcatgatgaactgaaaattgaagggaactatgaatattcaacaggctgattgcagaaatttaagaaaagacacattaatttttcaaagatttgtggtgaataaagcaactgctgatcatgaagaagcagaaaaattcattgacaagtctgccaaggccatcactgatgaaaatctgacaccagaacaagtctataatgctgatgaaacatcacagtttagtgttagttccccagaaagactctgactacagcccctacaggataagaatgccatggacagagtaactgtcctgggaggtgctaatgcagaaggcacactaagtgtaaacctgctgtgtgggaaagattgggttcattattagactaacaaaaaggcatgggtcactagggacatcttttctgattggtttcacaaacattttgtagcagtggttcaggtttgctgcagggaagctggactggatgatggctacaagattttgttattccttgacaactgttctgctcatcctccagctgaaaaatctcattaaatataatgtttattccatgtacttttccccaaatgtgacttcattaattcagcaagtgagcagggtatcctcagatcaataaagaataaaaataaaaacactttcttgaacagcctacttgcagcagtgaacagaaatatgagcgtggaaggttttcaaaagcagttcagcatttagaatgctgtatatgctattgtcgatgactggaacacagtatctaaagacacagttgtgcatacctggcacaatctctagcttgcaactatgttcagtaacgatgatgaacaaggcaatgactttgaaggattctgtatgtcaagataaaaaaaaaaaaaaataggccaggagcggtggctcacgcctgtaatcccagcactttggaaggccgaggcggtggatcacgaggtcaggagaccgagaccatcctggctaacacggtgaaaccccgtctctactaaaaatacgaaaaataagccaggcatggtggcgggtacctgtagtcccagctacttgcgaggctgaggcaggagaatggcgtgaacccaggaggcggagcttgccgtgagccgagatcgcgccgctgcactccagcctgggcgacagagcaagactccgtctcaaaaaaaaaaaattaattaaaaattttaaaaataaataaataaaaataaaaaggtgtttgacttccttacatatacaaaaaaataccttcagagtctgtcagtaagttggaagaaatggatatcaaataagtttttaacattgataatgagtctccagttgctcattcattgaccaatggtaaaatagcagaaatgggctgggcacggtggctcacgcctgtattccagcactttgggaggccgaggtaggcgtatcctttgagctcaggagttcgagaccagcccgggcaaacggcggaaccctgtctctattaaaaaatacaaaacgtttggtgggcatgatggcacatgcctgtggtcccagctacttgggagactgagcctgggagatggaggttgcagtgagccgagatcacgccactgcactccagcctgggtggcagagttagaccctatctcaaaaaaagaaaaaagaaatagcagaaatggttctgaatcaaggttatggtagtagtaatgacaatgaagatgatgttaacattgcagaaaaagtgccggaagacaacatggtgtgatgggcttattttaggactagagtgcattcttaacagaataggaaatcacgtcactttataacatcaaagagagacttctaagacaaaagccactgttaatgaggcagacgattctcgaggaaacattttaaaaagccatccaagcaatggggaaaggattccctatttaataaatggtgctgggaaaactggctagccatatgtagaaagctgaaactggatcccttccttacaccttatacaaaaattaattcaagatggattaaagatttacatgttagacctaaaaccagaaaaaccctagaagaaaacctaggcaataccattcaggacataggcatgggtaaggacttcatgtctaaaacactaaaagcaatggcaacgaaagccaaaattgacaaatgggatctaattaaactaaagagcttctgcacagcaaaagaaactaccatcagagtgaacaggcaacctacagaatgggagaaaatttttgcaatctactcatctgacaaagggctaatatccagaatctacgatgaactcaaacaaatttacaagaaaaaaacaaacaaccccatcaaaaagtgggcaaaggatatgaacacacacttctcaaaagaagacatttatgcagccaaaagacacatgaaaacatgctcatcatcactgaccatcagagaaatgcaaatcaaaaccacaatgagataccatctcacaccagttagaatggcaatcattaaaaagtcaggaaacaacaggtgctggagaggatgtggagaaataggaacacttttacactgttggtgggactgtaaactagttcaaccattgtggaagacagtgtggcgattcctcagggatctagaactagaaataccgtttgacccagccatcccattactgggtatatacccaaaggattataaatcatgctgctataaagacacatgcacacgtatgtttattgcggcactattcacaatagcaaagacttggaaccaacccaaatgtccaacaatgatagactggattaagaaaatgtggtacatatacaccatggaatactatgcagccataaaaaatgatgagttcatgtcctttgtagggacatggatgaagctggaaaccatcattctgagcaaactatcacaaggacaaaaaaccaaacaccgcatgttctcactcataggtgggaattgaacgatgagaacacatggacacaggaaggggaacatcgcacaccggggacggttgtggggtgggtggagcgggcagggatagcattaggagatatacctaatgctaaatgacgagttaatgggtgcagcacaccaacatggcacatgtatacatatgtaacaaacctgcacattgtgcacatgtaccctaaaacttaaagtataataataataaaataaaataaaataaaataaaaaagccatccagcagaatgtttccttatccctagcagacctatttcctggcccctcagctgcttctgatgtttcttctcaactaaaaaaaaaaccacacagtgtataatagtaacctttcaatcaaaaatcagcatcataggtgaaaactaaaagcctgccgttgtttgttgttcctgttgtttaaaagctgatagaggtattctggtaatgccactgtgctgcttcattaccctgaacatattttttttccactgtattaatgttatgccatattttttgcagttaagtacttatgcatgagcaagtataagaaaatgattgcttatcagtagcatgtaaattcagagtcagaaatgaaggtgatgccaaacaactccacagactgtccacatgggtggctgagatagtgacacctttcctttctgatggttcaatgtatgcaaactttgtttcatgcagaaaattacttaaaatattgtataacattacctacaggctatgtgtataaggtagatacaaaaatttcatgtttggccttgggtcccagccccaaaatatctcattatgtatatgcaaatactccaaaaaacaaaacaaaacaaaattcagaaatctgaaacatttatggtcccaagcatctcagataagggattctcaacctgaataaagcatcaatgttcttttttacagctgcatcctattcaattacagagatatagcatatcttacttgcccagtcttttgcttatggacatccaggttctcttttgatatgataaacaatgctgcactgagtaaccttatatataagtcaatgaatgaatgaatgaatgaatgaatgaatgaatatatataaacttatatataagtcaatgaatgaataagtcatgtgctagtatatatgtggaataaattcccagaaatgaaactgagaatacagacacattcacacacacataaatataaaagtagatatgctgacaaataagtatataatcatgtaataatataattttaataatgtagtataacataagatcactattgtcataactatatggtaattattaaaattattgattacattatggtatattttacctattataattatatgttatataaatatatatacatatacactgatttcagcaagttgtcctccatagagtttgtactaatttattctccaacaagtaatatatgagagcccttctttcccacagttccatcaatagggtatttaatgaaattatttggattttagccaatctgtgatgaaaacttattagctcagtgtagacttaacttgtattattatgagtgaagttgaccatcttttcatatgattaagaagctaaatcacctacttgttctttgctcatttttccactgggttttcggtccttttcttatgtgtatacaaaggaaactagcccttttttcgagattataaacattttcatttggattttgacttcacttataagcttttagttttgcagtctatttgattttttgccatataaaaaatgtcattattttatttttgcaaatgagtggatggtaatgccatttactaaggtaagaaacacaggggaaaaaaaaaacagtctggaggggaacaagatgggctcaattctagtcatctaaaagtagatttccggtaagcaactggatttacaaatctcaggagagatttgaactagaaatataatttttggtgtcatcagcacattgcttaaagctttcagaagagacaaaatcatcaagaaaatgtctaagaaaaaataagagtcaaacacaaaacacatatcaaggaaacaccaatatttaagaaatgaggtcatgaagcacaagaaggtaatatttggctacatcaaaagctaccaaaagtgcaagcagcttgaaagtttaagtatccattgtagaacttccacttctagccaccaggtttatgacaggaagcagaattatctgtcagctgcaaatagctacaaaactcaacaaaatgtaagaaactattttcagatgctggctatcaggcattccagaactggatatactgaggtccccaagagaaggagaagaaataagatgagccctgccatcgcccaggctttagatctagagactatgtcagactgtagcacaggaaaagaagaactcaaagagaaccaagtaattttgctgagttgaagaaatagagcttagagtttggtgaggaatcaaggcaaatggaaattccattacagagtatcgggagaagggagctatgcagggaaaaggttcagcaatctatctagaggtttccatgaaatgccaatctgtgcatgcttacaaaacactcctcaaagcccagcaaaaccagtttcttaaggcgaaaaaaaatgaccagggaggaataaaaagcaaaattcccagacaaggcaatttatcacaaaatatcacaaggcagggaatctttcccactatccagagttgaaagaactccacgaatacaaaggtcattcagaaaagaactcagaacagcattattttagaaaggagattatattaccaaaagataaaggatattccagattctccctagaggagcttaaaaactaacctcaaaagcatcaagccaaaccacaagacaacttgcttaactgcctaccagaacgagtctgtaacttcttaagcaaagcaaaattcaacattcacaaatgtaaaattaacaatgtcaaaaaaataaaaaaaaaaattattaaacctatgagtaatcaggaactataactcataaagagaaaaattagccaataaaacagacccagaaacgaggtggtgaaattgataaaaatcttaagaaaacctcttatgaatatactttcacatactcacagatgttaaaggaaatggaaggtagggggaaagataaatggaaatttaagagataaaaaataaaatatttgctttcgttgctgcagcagacgctgtgagtattttcaatgcttcagaagaggcttgcctctagtgtcctccgctgtggcaaaaagaagatctggctggacaccaatgagaccaatgaaattggccatgccaactcctgtcagcagatccagaagctgatcaaagatgggctgattatccataagcctgcgactgtccgttcctgggctcactgccaaaaaagcaccttggcctgccagaagggcaggtacatggtcataggtaaacaaaaagggtacagccaatactcaaatgccagagaaggtaacctgggtgaggagaataggaattctgcatcagctgctcaaagatactgtgaatctaaaaagactgatcgccacatgtatcacagcctgtacctgaaggtaaaggggagtgtgttcaaaaacaggtggattctcatggaacacatccacctgctgaaggcacacagacccacaagatgctcctggctgaccaggcagaggcctgctggtctaagaccaaggaagcatgcaagtaccatgaagagcgcctccaggccaagaaggaagagagcatcaagactttgtccaaggaggaagagacgaggaaataaagctccccttctcttgtctgtacatagtggtcttggtgattatacagatcaatcattaaaataaaacaagcctttatctgctaaaaaaaaaaaaaaatctgaaatataaattttgttgaataagattaaaaggagattagacagtgcagcacaaaagatgaaatcatttgaaaaggaaaaagtgttatttaaataaaggaagaaacaaaaagcctgagtcccacatgaaaaagaaacaaatgggatgggaagtaaggaaagaaaagtaaggaaaggaaggagggaaataaggagaaacattttccaaattttatgtaaaccataaacccacacagatgcatcaaattcaacaaatttgaaaagataaaacacacaaagagagaaagaaggagagggagagagagagagagagagagaaccaaaatatattatgatcaaattgctgaacatcagtgagaaagaatactaaaagtagtcacaggaaagacatataggcatatctcagagatactgcaggttcagttccataccgcaacaataaagcaaataccacaataaagcaaataacacaaaaatgtttgttttcccaggatatataaatgtttacactatactgtagtctattatgtgtacaatagcattatgtctgaaaaaacaacgtacataccttaatataaaaataatgtttgaggtgaaggatacccactatgccctgatgattgttatgcattatatgcctgtatcaaaatatctcatgtacccaatatatacacctactatgtacccataaaaattaaaaataaaaaagattttaaacactttattgctaaaaatgccaatgatcatctgagcctacaacgagtcaaaatctttttgctggtggagaatcttgcctctatgttgatagcttctgcctgatcagggtggtggttgcaaaaggttgggttagctgtggaaatttcttaaaataagacaacaatgaagtttgccacatcaattaattcttccttcccaaaagatttctctatagcatgtgatgctgtttgatgcatcttactcacaagtagaactttcaaaattggaatcaatcctctcaaaccctgccactgctttctcaattaagattatggaatattctaaatccttttttatttccaagatggcagattagaggcttttagtgggcctcattcacttggaaatagcaagatagtgtacaaaggccaactctgagagctttaattcacaaaggaaaacaggaatccactggaatcgtgacagacacctcagatccaaggaagacacacaaacacaaacagcccctattatggcatccaattgataaaagtgagggaagcccaagtatgcaagacagtcagaaagcctccctctgtgactcacttttccactggagatctgagcaacccaggtcaagaaagagcactttgtttcttctaagccctggatctaacttggggacaagctgatttggagatgctgtgagggacagacactcggaaaagctactggcatttcccagacccaggatggagagcaggacactattttaaatgtgggtgcatgcaagtcaaccattctttggcaacccagtagcatggccacataggcttctggctctggagcaggacagaggtcttcacagccacactgtagttagtgcctcagcagtaggtgctgggattgtgctctcctccactgcaggtcaaggatgagagaagagctgctacagctattgtttctcctggacaaccagacttcaagccagatccagcttagcaacctggaactggtctgcatgtgccatgattggttgccacagcctgttcccctgtggtgcagcagggccctctctgctctactccctggcaaaaatccaggcatttggagcaactgtttgcctggacaagcaggctgaaccacctcacccttcatggatatagatcatggcacagtggaggcctctctgctccacatgcaggcagatctagagctattcagagcaccccctcacctgcaaccgcagtctgagttgccttacccttcctgtgtgtgcatagattgtggtacagtggggccctctccactccacatggagacagatacccaggcatctaatgcacctgctcacatggactagcagattgagttgccccacttttcctgtgcagagattctgtgcaggggggccctctctgctccatgcccaggcaaatctccaggcattcagagcatctgctcacctgaatcagcagcctgacttgcctcacccttcctgtgcagagatcctagtgtagggaggccctctctgcttcacactcagacagatctcccaggcattcagagcacccactcacctggatcagcagcctgaactgctccatccttctatacatagattatggtgcagcaaggcccttccactccattgcccaagaagatctccagatattcaaagtacctatttgcccaaattggcatattgggccatgccactcttcctatgaagagatctgggtacaggcaggccctccctgcttcatgcccaggcataactccaggcattcagagcacctgcttgcctggttcagcagcctacatcaccccaaccctcctccgcagaaatcttagtggtggtggggtggcagggggaccctttccacttcatatccaggcagatgtccagccatctggagcacctactcttcaggattaggagtttaagctgccacccatccctgtgcagagaacttagggccaaggaggtctcccagcttcatacccaggtacacctctgggtgcttggtgactacccactggattctccctatgcgctgacacttgtgcttgccactggagggtctggcggtgagcctgcccagtccagccctgcatatctttccctctgccccctcagggctgagcaggaaactcagactactgtacactccacaaatcagcccactgcctgaggcaacggagagctgctcccagtaaacaaggatcaaatatatacccagtcacactggcaacacctggctcttacccataagcttataggccaaactacacagcccaatataaaacctgccaactgaagtgcataggactataaaaacaaagccaaaagactctacacagcattatttccactcacaacccctaaggagtaggggaaagggaaagaagaaaaaaacaacattgtaagacaagaaagaaaaaatcctaccagtacgaaaataattacacaaattagcagtgccagtgtctccagatgggaagaaaccagtacaagaatactggcaccatgaaaaaatctgaatgtagtgccaccacagaaggatcacactagctctccagcaatggtccccaaccaacaaggacactcagaaatgacaaagaactcaaagcatgggttgcaaggaagctcagagatccaagacaagattgaaaatcaatactaaaaaacttcaaaggaaatccaggaaataagaggtaaagatttttaaaagaaatcaatcagagcttctggaaatgaaaaaggtttacttaagaaatttcaaaatataactgaaagctttatcaatagactggaccaagcaaaagaaagaatttcaggccaggcatggtggctcatgcctataatcccaacacttgaggaggctgacgtaggaagaccatttgagccaagtagcttgagaccatcctggaaaacataaagagaccgtgtctttccaaagaaatttaaaaattagctgggcatgatggtttgcacctatcgttctagctacttgggaggctggggtgaaaggatcacctgagcctgggagttcaaggctgcagtgagccatgatcacatcactgcaaaacagatgaacaaaaggaaaaaagaagaaaggaatgaaagctgatcttttgaactaacccagtcaacaaaaatagaggaaaatgaacttttaaaattgaacaaagtctttaagaaatacaggattatgtaaagcgatcaaacctataaattattagcattcatgatacagaaagagaaaaagcaaacaacctggaaaatatatttgaggaactaactcaaaaaaatttccctaatcttgctagagtagtagacatccagatacaacaaatccagacaacaactgtgagataatatacaaatccagacaacacttgtgagataacatacaaaatgaacatcaccaaggcatatactcaccaggccgtccaaggtcaatgtggtgcggtggctcacgcctgtaatcccagcactttgagaggccaagacgggcagatcaagaggtcaggagatcgagaccttcctggccaacatggtgaaaccccgtctctactaaaaatacaaaaattagcttggtgtggtggtgcatgcctgtagtcccagctactcgggaggctgaggcagaagaatcacttgaacccaggagctggaggttgcagtgagctgaggtcgcaccactgcactccaatctggcaacagagcgagactccacctcaaaaaaaaaaaaaaaaaaaaaaaaaaacaagaactgaaggaagagatatttaatgaaatagatagcataaataaaaaaacttcaggaaacaatggacacatttacagaaatgcaaaatgctctggagagtctcagcaatagaatcaaacaagcagaagaacgaacttgagagctcaaagacaaggtttttgaattaacccaatccaacaaagacaaaggaaaaagaataagaaaatatggacaaagcctccaagaagtctgggattatgttaaacgaccaaacctaagaataatcagcattcctgagaaagaagataaatctaaaagtctggaaaatatatttgggggaataattgaggaaaacttcccagccttgatagagacccagacatccaaatacaagaagctcaaagaacacctggggaattcatcacaaaaagatcatcgcctagacacactgtcatcaaattatctaaagttaagacaaagaaaagagtcttaagagccatgaggaaaaagcaccaggtaacctttaaaggaaaacctatcagattagcagcagatttctcagcaaaaactttacaagctagaagggattgcagccctgtcttcagcctcctcaaacaaaacaattatcagccaagaattttgcacccagcgaaactaagctacataaatgtcggaaagatacagtctttttcagacaaacaaatgctgagagaatttgccactaccaagccagcattacaaaaactgctaaaaggagctctaaatcttgaaacaaagccagaaaacacatcaaaacagaacccctttaaagcataaatctcacaggacctacaaaacaaaaatacaatttaaaaaacaaaacaaaacaagaaaaccaaggtatacaggcaacaaatcgcataatgaatggaatgatacctcacatctcaataccaacgttgaatgtaaatagcctaaacattccacttaaaagatacagaactggccgggcatggtggctcacgggggtaatctcaatactgggaggccgaggcaggcagatcacaaggccaggagttcgagaccagcctggacaacatggtgaaaccctgtttctactaaaaatacaaaaattagccgggcgtggtggtgcgcgcctgtaatcccagctactcaggaggctgagacaggagaactgcttgaacccaggaggcggaagttgcagtgagccctgattataccactgcactccagcctgggtgatggagtaagactccatctcagaaaaaacaaacaaacaaacaaacaaaaaaaaaaatacatatataattgcagaacggataagaattcaccaaccatctgctgccttcaagaaacacacctaacacataaggactcacataaacttaagctaaaggggtggaaaaagacattccatgcaaatggacaccaaaagcgagtaggaatagctattcttataccagacaaaacaaactttaaagcaacagccattaaaaaagacaaagagagtcataaaaggccttgtccaacaggaaaatatcacaatcctaaatatatatgcacctaacactggagctcccaaatttataaaacaattactaatagacttaagaaatgagacagcaactataatagtgggggacatcaacactccactgacagcactagacaggtcatcaacacagaaagtcaacaaagaaacaatggatttaaactataccctggaacaaatggacttaacagattatacagaacattctactcaacaactgcagaatatacattctattcaacagcacatggaactttctccaagatagaccatatgagaggccacaaaacgagcctcaataaatttaagaaaactgaaataatatcaagtactctctcagaccacagtggaataaaatggaaaatcaactctaaaaggaaacttcaaaatcatgcaaatacatggaaattaaataacctgcttttaaatgatcattgggtcaaaaatgaaatcaagatggaaatttaaaaattcttcgaactgaacaacaatagtgacccaacctatcaaaacctctgggatacagcaaggcagtgcttagaggaaagtttataaccctaaatgcctacatcaaaaagtctgaaagagcacagacaatctaaggccacacctcaaggacctagagaaccaagaacaaaccaaacccaaacccagtataagaaaggaaataaccaagatcagagcagaaataaattaaattgaaacaaaaaaaatacaaaagataaatgaaacaaaaagctggttctttgaaaagataaaataaaattaatagaacattaacaagattaccaagaaaagaagaaagaaaatccaaataagctcaattagaaccgaaaagggagatattacaactgataccaaggaaatacaaaagatcattcaaggctactatgaacccctttatgtgcataaactagaaaacctagaggagatagataaattcctggaaagataaaaccttcctggcttaaatcaggaagaattagataccctgaacagatcgacagcaagcagcaagattgaaatgataatttaaaaattacaaacaaggcacctgggaggccgaggcaggtggatcacctgagatcaggagttcaagaccagcctgcccaacatggtgaaaccctgtctctacttaaaatagaaaaaagtagctgggcgtggtggtaagcagctgtagtcccagctactcgggaggctgaggcaggagaattgcttgaacccgggaggcagaggttgcaatgaggcgaaatcgcgccattgcactccagactgggggacaagaaggagacttcatctcaaaaaaaaaaaaaaaaaaagtccaggactagagagattcacagcagaagcagaagtctaccagacattcaaagaagaattggtgccaatcctactgaaactataccacaagacagaaaaagaaggaaccctcccgaaatcattctatgaagccagtatcaccctaataccaaaaccaggaaaggatgtaaccaaaaaagaaaactacagaccaatatccctgattaacatataagttaaaatccttaacaaaatactagctaaccaaatccgacaacatatcaaaaagataatccaccatgatcaagtgggtttcataccagggatgcagtgatggtttaacatacacaatgtgatgatacaccacgtaaacagaatcgaacacgaaaatcacatgatcgtctcaacagatgcagaaaagcattcaacaaactccaacatccctctatgattaaaactcagcaaaatcagcatacaagggacatacctcaatgtaataaaagacatctatgacaaacccacagccaatgtaatactgaataggaaaaagctgaaagcactccctctgagaactggaacaagacaaggatgcccactctcaccactcctcttcaacatagtactggaagtcctagacagaccacttagacaagagaaagaaataaagggcatctaagccgggtgtggtggctcacgcctgtaaccccagcactttgggaggctgaggcaggtggatcacgaggtcaggagttcgagatcagcctggccaacatagtgaaaccccgtctctactaaaaatacaaaaacttagttgggcatggtggcaggcgcctgtaatcccagctacttgggaggctgaggcaggagaatcacttgaaccccagaggcagaggttgcagtgagctgagatcgcgccattgcactccagcctgggggacagggtgagactccgtctcaaaaaaaaaaaaaaggcattcaaatcggttaagaggaagtcaagctgttgctgtttgctgatgatatgattgtttacctagaaaaccctaaagactcccacagaaagctcctagaactgataaaagaattcagcaaagtttccagatacaacattaatgtacacaatcagtatctcttctatacaccaacagcgaccaagctgagaatcaaatcaagaacttaactcctcttacaatagctgcaaaaataaataaaatacttaggaatacacctaaccaaggaggtaaaagacctctacaatgaaaactacaaaacactgctgaaagaaatcatagatgacacaaacaaatggaaacacatcccatgctcattgatgggtagaatcaatattgtgataatgaccatactgccaaaagcaatctacaaattcaatgcaattcccatcaaaataccaccatcattcttcacagaattagaaaaaacaatcctaaaactcatatggaaccaaaaaagagcccacatagccaaagcaagactaagcaaaaagaacaaatctggaggcatcgcattacctgatttcaaactatactctaaggccacagtcaccaaaacagcatggtactggtataaaaataggcacatggaccaatggaacagaaagaacccagaaataagcccaaatacttacagccaactgatattcgacaaagcaaacaaaaacaaagtggggaaaggtcaccctattcaacaaatggtgctaggacaactgacaagccacatgtaggagaatgaaactggatcctcatctctcaccttataaaaaatcagctcaagatggatcagggacttaaatctaagacctgaaactataaaaattctggaagataacattggaaaaactcttctagacattggcttagtcaatgatttcatgaccaagaacccaaaagcaaatgcaataaaaacaaagataaatagctgggacttaaactaaagagcttttgcacgacaaaagaacggtcagcagagtaaacagacaacccatagagtgggagaaaatcttcacaatctatacatctgacaaaggactaatatccagaatctaaaacaaacacaaacaaattaagaaaaaacaaacaatcccatcaaaaagtgggctaaggacatgaatagacaattctcaaaagaagatatacgaatggccaacaaacataggaaaaaatgctcaacatcactaatagatcaagaaatgcaaatcaaaaccaaaatgcgattccaccttacttctgcaacaatggccataatcaaaaaataattgatgttgtcggggatggagtgaacagggaacacttctgcactgctagtgggaatgtaactagtacaaccactatggaaaacagtgtggagattccttaaagaactaaaagtagggctgggagcagtggctcacgcctgtgatcccgacactttgggaggccgaggtgggcagatcacctgaggttgggagttcgagaccaggctgaccaacatggagaaaccccgcccctactaaaaaaaaatacaaaattagctgggcatggtggcgcatgcctgtaatcccagctacttggaagactgaggcaggagaaatcactttaacccaggaagtggatgttgcggtgagctgagattgcaccattgcactccagcctgggcaacaacagtaaaactccgtctcaaagaaaaaaaagaactaaaagtaaaactaccatttgctccagcaatcccactcctgggtatctacccagaggaaaagaagtcattataagaaaaagacacttgcacgcaagtttatagcagcacagttcgcaattgcaaaaatgtggaaccaacctaaatgcccatcaatcaacaactggataaagagactgtatgtgtgtgtgtgtgtgtgtgtgtgtgtgtattacatatgtgtgtacatatatgtgtatgtgtgtgtgtatgtatatatatgatggaatactactcagccataaaaaggaatgaattaatggcattcacagcaacctagaggagattggagactattattctaagtgaagtaactctggaatagaaaaccaaacatcatatgttctcactgatatgtgggagctaagctatgaggacgcaaaggcataagaatgacacaatggactttggagactcagggggaaagggtgggaagcggataagggataaaagacgacaaattgggtacagtgtatactgctcaggtgatgggtgcaacaaaatctcacaaatcaccactgaagaacttactcctgtaaccaaacaccacctgttccccaataacttatggaaattaaaaaaaaattttaataaaaaaatggagaaaccccatctctacaaaaaatacaaaaaattagccagatgtggcggcacaagcctgcagccccagctactcaggaagctgagatgggagaatcacctgaatctgggaggttggagccgaaattgtaccactgcactccagtctgggcaatcagagtgagacagtctcaaaacaaacaagcaaacaaatacttctagacctaggaaaagacttaaacaaccatacataataatgggagacttcaacagcccactgactaatgcattagcctgaccactgaggcagaaaactaacaaagaaattctggacttaaattcaacacatgatgaattggacctaacagacatctgcagactacttcatccatcaaccactgaagatacactgttctcgtctgcacatggaagatactacgagatcaaccacatgctcggccataaaacatgtctcaattaattcaaaaaaaaaacaaaatcataccaaccatactctcagaccacagtgtaataaaaataaaaatcaataccatgaagatctctcagaaccacataattacatggaaattaaacaacttactcctgaatgacttttgggtaaacaattaaattaaagcagaaatcaaaaagttctttgaaataaatgaaaacagagtatcaaaatctctgggaagcagcaaaaaagtataaacaggaaagtttacaacactaaacacctacctcaaaaaatcagaaaaatctcaaatcaacaatctattatatctagaggaactagaaacaaaagaacaaactaaccataaagacagcagaagaaataaaagcaaagaactaaatcaaattaagaccaaaaatacaaaggatcgatgaaacaaaaagttggttttctaagaggaaaaacaagaccgacagactgcaagctagattaacaaaagaaaaaagagagagaagatccaaataagcacaatcaaaatgacaaaggtgacaagcaaccaatgccacaaaaatacaaaagttccttagggacaattatgaacactcctatttacgcaaactagaaaacctagagaaaatggataaattcttggaaacccacaatctcccaagattgaatcaggaagaaatagaaaccctgagcagacatcagtattgaattctgaaattgaatcaataattaaaaacttatcaaccaaaaaaatccctggaccacatggatttacagccgaattctatcagatgtacaaagaagggctggtatcaatccttctgaaactattccaaaaatcaaggaggaactcactgcaactcattcgaaggatgcatcaccctgatacgaaaacctggcaaagacacaaagaaaaaagaaaactacaaaccaatatccctgatgaacataagacacaaaaatcctcagtaaaataactagtaaaccaaggctcggcacagtggctcacgcctgtaatcccagcactttgggagcctaaggcaggtgggtcacctgaggttgggagttcgagaccagcctgaccaacatggagaaaccccggctctactaaaaaacccaagttagccaggcgtggtggtgcatgcctgtaatcccagctactccagaggcttgaggcaggagaatggcttgaacccgggaggcaggggttgctgtgagacgagatcgcgccattgcactccagcctgcgcaacaagagccagacaagagcaaaactccgtcgcaaaaaaaaaaaaaaaaaaaaaaaaatatatatatatatatatatatatatacatactagtacaccaaatccagcagcacatcaaaaacttaattcactgtggtcaagtaagtttcattcctgggatgcaaggttggttcaacatatgcaaatcaataaatgtgatccaccacataaacagaatttaaaataaaagtcatatgaccatcccaacagacatggaaaaagctttcaataaaatccaacatcccttcatgataaaaaaaaaaaaaaaaaacctcttgaacaaactagacatcaaaggaacatacctcaaaacagtaagagccatctatgacaactccacagccaacatcatactgaataagcaaaaaatggaagcattccccttgagaactggaataagacaaggatgcccactcttagcacccctattgaacacagtactggaagtccttgccagaacaataaggcaaaagaaagaaataaaaggcatccaaatagaaaaaggagaaggcaaacaatatctcttcacggaaaatatggttctatacctagaaaacctgaaaggctccaccaaaggctcctggaactgataaactacttgagtaacgtttcaggatacaaaatgaacaaaaaccagtagcatttctatacaccagtaacgttccagctgagagccaagtcaagaacacgatcccatttacaatggccacaaaatacaatacaatacaatacaatacaatacaatacaatacaatacaatacaatacaatacaatacaatacctaggaatacatctaaccaaggggatgaaggatctctacaaggagaactataaaacactgctgaaagaaatcagagatgacacaaacaaatggaaaaacatttcatgttcatgaagtggaaaaatcaatatcattaaaaataaaaaacatttcatgttcatgaagtggaaaaatcaacatcattaaaatggccacacagcccaaaggaatacacagattcaacactattcctatcaagctaccaacatcattttggacaaaactagaaaaaaactattctaaaattcatatggaaccaaaaaagggcctgaacagccaaggcaactgtaagtaaaaaggacaaagtcagagatatcacattacccaacttcaaactatactataaggctactttaaccaaaaaatcatggtactggtaccaaaacagacacatagaccaatggaactgaaaagagaacccagaaataaagctgcacacctacagccatctgatcttcaacaaaattgacaaaagcaatagggaaaggactccttaattcaataaatggtgctgggatagctgactagccatacgcaaaagaatgaaactggacccctaactcaagatagattaaagatttaaacagaagacctcaaactgtaggaatcccagaagaaaaaagaggaaacaccattctggacatcagccttgggaaagaatttatgactaaaagcaattgcaaccaaaaaactgacaagtgggacctaattaacctaaagagctgcttttgtgcagcaaaagaaactctcaacagagtaaacagacaatctacagaataggagaaaatatttgcaaactatgcagccgtcaaaggtctaatatctagaatctgtaagaaacttaaatcaaaaagtaaaaagcaaataatcccattttaaaaatcggcaaaagacatgaacaaactttcatcaaaagaagacatacaagtagccaaacatatgaaaaaatgctcaacatgactaatcataagagaaatgcaaatcaaaaccacaataatataccatttgtaccagtcagaatgacaattattaaaaagtcaggcctcggatttctggactgatagtgagcactggcttcaacttaaagtcaccaacctcaccagtccctaacaagaaagtcagcctgtactttgaagttttgaagccagccactgacatcttttccctagctatgacagtcctagatgacaccatcttccagtagaaagctgtttcatctacattgaaactctgttgtttacagcagctacactcatcgattaccttaactagatcttctgataacttattgcagcttctatatcagcatttgctgctagtgggtggtttcttggcccacctgaagggcagacagcttttgcttctacttgcccatcagaaacatgattttttgcctggagtcagaatgaaaaatattcctatccttcccccatcagcagatggcttttccttctctctctctcccttaggacaagtatatcatgtgcaaggattggaagacaatatttttaaactcaatcctccccagtttgagcttagatcaaggcaataagaatcaaaatcccagaagcctttctggtatgtcattacacatcactttgaaaggtgcatgccaaaactgagagaaagtaagataactgactgcaaaggaacacaacacaactttttgaggtggtagaaatgttctaaatcttgatttgggtgagttacaggattatacacactttgtcaaaactcatcaaactgcacacttagagaacatgaactttattatataaaaatattaatgatcctatcttttaaaacttcagccagtttttctagtagaaattgacaagctggcaatcttagagtttgtgtattttcttcaatgctgctcagaactctgacagtagaatttgtccagagttagcattttccaggcagatgccacagaacaacaatgatataagggagttaaagatattagcaaaagaatggttgatgaaatagaccgagcagagaaagaaattttaaaagagggaggggaactaatgagcagggagaggaataaagtagaaacattttgtgaacgattaaagagcatattcctatagaaagagaagcaatcttttttaaaaattgacaattgtgccttagaaatcaaagagacttcaccttcatggctaagctcaagatgaagccatccacatgatacagcaatagaggcagcactatactaacaaatctcattaatattaaaccaaacaagtaatctaatggctacattattctccaggagtaaaaagtttgcttcaaggcagctcataatctggctcactttaaacaaataagtcaaagatcccccaaatgaatccagtaaacacgagaattttctatatttctatatttctatgtcaatataaaatacacatacaacacaattttctattttcctgacttggcaaacacaatataatgtacagagtttcatctgtctttgacatattgtgaattttaacacctcagaatatcatcataaaggtaatgtttttaatcaaaggcccccaaaaacgttattcttgactgagtggctttagagcatgtactcttctagttgcttgggaattttgtggagaacaagttacccacaaagtacctctcctggaagttaaaacagaggatttcttatatgcttaggcagacatactctagaatcatctttttaaaataagcaactagcaaatgcaatctggttttcctattgctatgttttggatatgtcccctccaaaattcaggtgctgaatctaaacggtcaatgtcatgtattaaaaggtggggtactttcagaagtttgaggttatagtgagctatgatcatgccaccacactccaacctaggcaacagagcaagaccctttaaaaaaaatcaggcctttaagaggtaattaggtcatgagggctcctcacctcgtgaatgggattaagaccctaatgaaagagatttcacccctgtcctttcacaatgtgaaaacacagcattcctcaccaccagaggatatagcaacaagacactatcttggaggcagagagcagcccttattggacaaccaaacctgctggcagcttgatcttggacttcccagtctttagaaccatgagtaaataaatttctcttctttataaattacccagtctatggcattttgttacagcagcacaaacagacttaagacatctatcatttgactatctcattaagtttaggcaagagcataatctcctattatactggcaatggaaatatactgaatcaaagataaaagcaatcatttttaaacattagtattacatgcagtgcaaaaacccaaagtgacggcagtcttacattgccaaagccatcaaaaggggaaggagagggaagaacagcagcataagctgctggcagaggcagggaaagacaagcagaaaggaaagagagaaagagacaaagtcagagagacacaggggaagagacagagagaaaaagagggagtcacagagaaagagagagacaacaaagaagtcaaaaagaaagggagatagaattagtaaagaaaaaagcagtgtaccctattcctttaaaagccagggtaaggttctgtctacccagccaaggtatattcttcttatgtggaatgtctacctatatctgcctccccactaactggaccggcacctgcaccttagtctttccaagttccaacattaacattgccccaggaaatcagaccctatcagtacccctcaaagctcaagtccatcagcacagagccatacaactaatacccctacttaatagggttaggaatggctactgctacaggaaccggaagagccagtttatctacttcattatcctactaccacacactctcaaaggatttttcagacagttttcaagaaataatgaaatctatccttactctacaatcccaaatagactctttagcagcagtgactctccaaaactgccgaggcctagacctcctcactgctgagaaaggaggactctgcaccttcctaggggaagagtgttgtttttacactaatcagccagggatagtacaagatgccacccagcgtttacaggaaaaggcttctgaaatcagacgcctttcaaattcttataccaacctctggagttgggcaacatggcttctcccctttctaggtcccgtggcagccatcttgccgctactcgcctttggaccctatatttttaacctccttgttttgtttcctctagaattgaggccaccaagctacagatggtcttacaaatggaacctcaaatgagttcaactaacaacttctaccgaggacccctggaccgacctgctggcactttcaatggcctagagagctcccctctggaggacactacaactgcagggccccttcaaagcccctatccagcaggaagtagttagagcggtcatcggccaaattcccaacagcagttggggtgtcctgtttagaggggggattgagaggtaacaacgtgctagcagccctcactcactctcagcacctcctcggcctcggtgtccactctggccacgcttgaggagcccttcagcctgccgctgcactgtgggagcccctctctgggctggccaaggccggagccggctccctctgcttgcgggaaggtgtggagggagaagcgtgggcaggaaccaggactgcgcgcagcactcatgggccagcacgagttccgggtgggtgtgggcttgatgggccccgcactcagagtggccagctgatgccgccagccctgggcagtgaagggcttagcacccgggccagcagctgcggaaggggcaccgggtaccccagcactgccggccctcccgcgctgagctcgaattcttgccaggcctcagccacctccccacagggcagggctcaggacctgcagccccccatgccagagccccccccaccaaggtgggctcccgtgcagccggagcctccccaacaggcgctggcccctgctccacggcgtccggtcccataaaccgcccaagggctgaggagtgcaggcgcacagtgcgggactggcaggcagctccacccgtggccctggcatgggattcactaggcgaagccagctgggttcctgtgttgggtggggacttggagaacttttatatctagccaaaggattgtatatgcaccaatcagcactctgtgtctagctcaaggtttgtaaacacaccaaccagcactctgtgtctagctagaggattgtaaatacaccaattagcactctgtctagctcagggattgtaaacgcaccaatcagcaccctatcaaaacagaccaatcagctctctataaaatggaccaatcagttctctgtgaaatgggccaatcagcaggatgtgggtggggtcagataagggaataaaagcaagctgcccaagccagcagtggtaacccgctcggtccccttccacactgtggaagctttgttctttcgctctttgcaataaatgttattgctgctcactctttgggtctgcactgcctttatgagctgtaacactcacctcgaaggtctgcagcttcactcctgaggccagcgagaccatgaacccaccgggaggaatgaacaactccagacacactgctttaagagctgtaacagtcaccgcaacggtctgtagcttcactcctgaagccagcaagaccacgaacccaccagaaggaagaaactccaaacgtgtccgaacatcagagggaacaaactccggacacaccatctttaagaactgtaacactcaccacaagggtccacagcttcattcttaagtcagtgagaccaagaacccaccaattccagacacattaggatatgccttttttttttcagtgacatccaaattctctagcacttcaaaacagtaagcttgttgtatctcatttttgttgtttcctgttcaatgtaagaatttccagccagaaacagtggctcatacctgcaattccagcactttggaaggtcgaggtgaaatgactgcttgaggccaggaattcaaaactagcctgggcaatgtagcaagatcctgtctctacaaaacattttaaaattagccaggcatagtaatgggtgcctgtagtcctagctattgaggaggctgaggcaggagaatcccttgagcccaggagtatgaggttatagtgagctatgactgtgccactgcactccagcctggactacagagcaagaccctgtctcttaaaaaaataaaaaaggaaaaaataattctgtcaaaatttttcctagctctcaatacaaagttttctaaatcttgaggggaggtgaagattctgtatagaatagtctccattttctccaaattcttcctaattttttataatttcaagaataagttacatttcaaattataccacagataatgctaatatggtgataaattatttaatattcttatcatttagagatgcatgctacaagttaagaacatatctaagattaacttcaaaataataaaggatgcagtatatataggggaatatattatgtaagattggccaaggaattaataattgttgaaactgggtgatgaatacatataggttcactttctcaactttgctaaactatgtttaaagttctccctaataaaaagatttttaaagagtaaacaataggtattaaatctaattaaattgttcttagaaataattagacacaaaaaacagtattaattgtaaattatttataacaaaatttagaaggaaattaaatgtccaaacataaaatattaattagttatagaacactcattccatgagataccaagtagccactaaaaatcatgttgcagaaaactcattgatataaaaagaattcacaatatacttctaagagaaaaaaaggcaggttacaaaataatatgtacagaattgaaccattttttaaatgtgagcatctgtgtgtgtatgtgcgtgtttgcatatgtgtgtatttctgccaaatactgacagactttgtttcattcactgctttatccccagcacaaaaaactgtacctggaacataataagaacaatacatacttgttgcaggtaaaggttttagaattccagacaacagggtttcccttggggtatgattctctctacgcttttgtttcatacggtttctcaaataaacattcagttttttctgttattgggggaaaacctttaaaattgtatctcacataacaaaattaaaatttatttgcctgattcaataattacttcatgaaatgcattcaataaaatcatcttatacactgaaaaaagaaaggcctcttctatactttgaatgaataaactggccacggcaatcagaaatagtaaaaacaggccaggcatggtggctcacgcctgtaatcccagcactttgggaggccaaagcaggcagatcacgaggtcaggagatggagaccagcatcctagctaacatggtgaaaccccgtctctactaaaaatacaaaaaattagccgggcatggtaggggacgcctgtagtcccagctactcgggaggctaaggtaggagaatgacatgaacccaggaggcggagcttgcagtgagccaagatcgcgccactgcactccagcctgggcaacagagtgagactctgtttcaaaaaaaaaaaaaaagaaaaaaaaagaaaagaaatagtaaaaacaataacctgttaatcagtcttatccctgtgagtgaattctgctgctgagcaataacataaccttactatctttaggaaactaatacttctaaaatgaatctttaaaacgggtacaaaaaattataaaatcagttttaaaaaattagtccattatattcattcaatacacacttactgaatttgtagacaataagttacctgctagggtaatccaaagaaaattaagttgtagcccttgataaccaagaggctcccaatctagtgggaaagatagatgaataaaagctaaatgaaacataataataaaggtagctgacatttattaggttctttttttggcattgtgctgacacttaacaagcattttctttcttttttttttgagacagagtctcactctgttgcctaggctggagtgcagtggtgcaatcttggctctctgcaacctccgcctcccaggttcaagcaatcctcccaactcagcctcccaagtagctgggattacaggtgtacaccaccacgcctggctaatttttgtatttttagtagagatggggtttcaacattttggtcaggctagtcttgaactcctggcctcaagtgatccgcccacctcggcctcccaaagtgctgggattacaggcgtgagccaccacacctggccaaacaagcattttcttatttaatccctataacaatctttttggtagttactacgatattctcagtttttagataagaaaacgttaagacttaaatgacttcctcagtcacttgagtaataaatggcaaaacagaatcaaaccaaataaaccctgtcccagatacaatatagtgtctctcattattaggatgctagtaaacaccaaagtggactctatcagttccatcagttactatcaagtataacacaatagtcaccttttttaaggtagatatccttttggaagtcttcccaagaatttcttatcttcaactcaactagttatctccactttgaaatacactattacaaccattaacctatgagcctctagagcacaggattcagtagtttctcttctcccagtgctatacaatgtatgcactcaagaaatattaaacagatgaacttttagcttcttttatgcttcctaaattccaaatcactatgccatattacataatagttggtctaggtcaatagcaatttcatttatgttattaggaaaatgtggtatgagagaatcagagaataaaattctgaagtgctaaattatggtggttatgctaatggcggaacactgctgactgtataagatgaaccaagatactcttcctccagggacttcttcctaatcttctaaatgtcctataagccaaattttataagagaactggaaatgtgcaaaactagggggtagttttgtttcttgcaaaaatctggtgataaagatctgagctaaaaatagcgagaatgatgggaaataattcaagagatatttcaaaagcagaatcatttctcactacatgcaagacaaaactcataactaactgcggaacctaagaccttctcagtcatctcatttctgtttcctacagcctagccagagtgaactacttcttaaaggtcctgaattctcacataacattttaaaactcccacaataactgtaatataggccgggcgcggtggctcacgcctgtaatcccagcactttgggaggccgaggcgggcagatcacttgaggtcaggagttccagcctggccaaaatggtgaaaccccgtctccactaaaaatacaaaaattagccaggcatggtggcgggtgcctgtaatcccagctactcgggaggctaaggcaggagaattgcttgaacccaggaggcagagttgcagtgagccaagatcatgccactgcactctagcctgggcgacaagagcaaaactccatctccaaaaaataataataataataataataataactgtaatataaaaagcagatagtgtgcagtcacttgtatgttacataagaaatagacagtagaacacaggaatgggaaaggcattcaaattttgtgttggaaaatgaatgaatgaagataatgcaggagaccttcataactgatttgagaagggactagcagctatctcttcatgatgagataatacaggccctacctctatatcaccattttctcttacaacatgatcttccccttctctctgcctgtcaaaattaaccacctccttaaagacacaatcaaaaattttctctgggaagtttaaagaaatcacctcctcacttctaccactgtccccacccatccacacaagcacacacacatacacaaagaactagtcccactgtctactatggtcccacagcacttggcacctgcctcattgtagtacttagtacagtgattcattattcctttcattattatgtactgtatgagaatatcactagagctagaatatgaattccataaagatatggatcatgtcttatctagcctatttccattaaatacctaccacagaacctcacacactactgtttaaataacatatctaataaataaatgaataaacaaatgaaaacaaatttgctaactcctggagacctaaaggaacctcaaaatgtctgtgacttaaaacatgcctttatgggaaaaaaaaaatatatcttcctatataaacgcttatggctaaccatgacctgcttcaacttaaatcagttttgctaccacagcaataaaaaatacacatatatggctagaagtcgatgcaaaggccaaaagcatccctaccagggctgaaatggccaatggggatattccaaattttatggttgcaaaatgacccaattaatcttagatttcagcaaagtatacatgctaactgaacaaagacaaaagtcactggagctcaagtcattattccaagtgactctaagctgttagtccctgtgttaatggagcctgttaaacaacccagtattagaaaacactggagctcagagggagcatgctaccccatgcacatttcccaagtatcctcacaataaacttctattactgaagataatctatgtacttctctaccttgagtcttaagagacctaagtaacagtaaataatataggaaaccaagcagaggaaagaatcacacaccaaatgtgaactggaaaaagtgacaacgccaattagtaaagattaggtgggctgaacacggtaagattaggtgggctgagcacggtggctcacgcctgtaatcccaacactttgggaggccaaggcaggcggatcacaaggtcaggagatcgaaaccatcctggctaacacagcgaaaccccgtctctactagaaatacaaaaatttagccaggcgtggtggcgggcacctgtagtcccagccacttgggaggctgaggcaggaaaatgccgcaaacccaggaggtagagcttgcagtgagccaagatcgtgccactgcactccagcctgggcgacaagcgagactccgtctcaaaaaaaaaaaaaaaaaaaggattaggtagaaggtgaggattcagttctgaacataatgcctttaaggagacagtaatcaaatatttgggtttttggttttgggggtttctgttttgttttggagacagagtctcattctgttgcccaggctggagtgcaatggcatgatcttggctcactgcaacatctgcctcctgagtccaaacaattcttgtgccccagcctcccgaggagctgggattacagaagcacactaccatgctcggttaattttttgtatttttagtagggatggggtttcgccatgttggccaggctggtctcaaactcctggcctcaagagatccagccacctctggctcccaaagtactgggattacaggtgtgagccactgtacccgaccagtaatcaaatgttatttaggagactggaaatagtgaataagactgagtacaaaaattccaagtctcaaaagtatttgtgggtcatttcaatcaaattgaagccattagagtagataaactcaccaaggaaataactatgcaaaataaataaataaaggaggaaaagatagaaaatgcaaagtcactgtcaattatgcactgtgaagatcagttcataaccgaacataaagcaggcagagaaacagaggcaacaggagaatcaaaatgccagagaaaacttcaagaaacagatatgaggaatgttaagaacagagaaaaagtttctggtcttgccaaaacaataactaatttgcaacctagagtagtttcattaataaacaaggcctgaccatgttggaaggctgaaacagaatacactcgtagaaacagatttttaaactggggggcaaaagtgtgattacaggaataaagtcctaagagctatgaaaagggacatgttcaaaggtcagataaaaggaagaagagaaaaaattgtcgtgtgacagaagcaaaaattatgtagaacaataatcaaatgaaattaagatgaaagtacataaggcagcacctcttcctaacagccactgtatttcaatcttctctaagaagtagcagaaagcatctgtgttaaattatatgaaaacatgagggcaggacaggaaagaaagtgtgaagtgagaggactggagctgtttctgaaaagtctgcaaacaccaaaacacatgaaacagctcagtcagtcataaaaggccttacggcagaaaaaatgaagggactatatttggtcctctttctttattttctctgtttccaaccttggaacagcagtttgcaagtttgtggacaggttgtaacttctgctaaggatgtctcttcagttttgaagagactcaggaaaagttcagaagaaaggagagagctgtttatgattggctaaaggcttttttttattattgtggcagaatatacacaacataaagtttactattttaacatgtacaattcagtgatccatacattcagctcttgtgcaacaattactgttatccatttcccaaactttttcatcatctataatatggtgatctagtaagaaattcctggcacactgcccctaaaacctttggaatttcccgaatgataagggtggaagaattatcttttgctattcataataagtccctttcaaacatatttgagcttatgctaaagagatgactcttggtaggcccctacaaagctgcaggggagtgggtagggaagctggtcacccaagaaatcaatcatgtgattacatagtcagaactttcagccccacctccagggaggggagaaggactagagactgacctaatcaccaatgaccaataatttaatcaatcatgcctacagggtgaagcctccataaaaaccctaaatgatgggactcagagaatttcttctggatcgatgaacacatccacgtgctgaaagagtgatgcaccccaactccatggagacataagctcctgcactggggacccttccagacctcaccctatgtgccttttcatctgtatatcctttataataaactggtaatagtaagtaaagtgtttccctgcattcaatgaatcattgtagccaatgactgaacttgatttgtagccaagtcagaagtaccagaggcctggggcttgcaactggcatctgaagtggtggaagtcttatacaactcagtccttaacctgtggtgtctgacactcactccagggagatagtatcaaaattgaattaaatgctaggacagagaactgagagctgtagggagaaaaccccatgtatttggtgtcagaagtcttataagtgtagaaaaagttttttatcatctccaaccaaaattctatacccattaaataactttccattttccacttccccatagtcccgtgtaaccactattctactttctgtttctatgactttgactattctagtggaatcatacaaatttgtccttttgtgtgtactttgcttcagttagcataatgttttcaaggttcatccatgttgtaacatgtatcagaattttatccctttttaaggctgaataatattccattgtatatatatataccacattttgtttatccattcatccgctggtggacacgtgagttgcttccacctttgggctgttgtacataatgctgctatgaatataggcacacaaatatcttgagaccctgctttcaattcttttgggtattgcattaatccgttctggcgctgctataaagaaatacctgagactcggtaatgcataaagaaaagaggtttaattggctcatggttctgcaggctatacaggaagcatagcagcttctgctctgcttttggggaagcctcaggaagcttccaaccatggtggaaggcaaagggggagtagcacttcacatggccacgtggccagagcaggaggaagagagagagatggggaggtgctacacacttagaaacaaccagatctcgtgagaaccctatcacaagaccagcactgtgggatggtgctaaaccattcatgagaaactgctctcatgatccaatcacctcccaccaggtcccacctccaacactggagattacaatttgacatgagatttgggcagggatacagatccaaagcatatcaggtatatacccagaagtggaattactgagtcacagggtaattctatgtttataatttcttgaggaattgctacactgtttcccacagtgggtgcactatttcactctcctaccagcaatgcacaagggctccaattgctccacatcctcaccaacacctgtgattttctgctgtttttttttttaataatagtcatcctaaagactatgaggtggcatctcattgtagtttccattgcatttccctgattactagtgatgtcaagcatcttttcatgtgcttattggccaatgtatacattttctttggagaaatctctaagttccttgcccactttttatttgggttatttgttttggagaaaagcttttaaagagagacacagaggaaagctttctgtacaatcagatctagctctctagtcaaaaataattggtgatatagtttgcatgtttgtcccctccaaatctcatgttgaaatgtgattcccaatgatggaggtggggcctagtaggaagtgtttgggtcatgggggaggatccttcatgaatggcttggtgttgtccctggcgatgagtgagttctcactctattaattcacaagaaagctggctgtttaaagagcctggcacctcctcttctctcttggtccctctctcttcccatgtgacacacctgctcccccatgccttctgccatgaataaaatcttcctgaagtgtcaccagaaactaagctgatgctgctgccatgcttgtacaacctgcagaaccatgggccaagtaaatctttcttcattaattacccagtctcaggcattcctttatactagcaacacaaaacagactaatacaattggtatctgccctctagatcttttaggaaactaatcatggagaagaggcactggcaagagtgctaacccagcagaagagaaaaaacttccacccctgagaacagagatttctttttcataaagtgccttctacctgatttcagctctgtaactgtcaatctctttttctcttctggcagatttccctatccactagagcataggttttaatgaccacactgctggtagctgtatcactactaatagtagctacttaatgagtcataagtgttactgctatgtgctaggcatgatccttcatctcatatgtgaaatctcatttaaaattaagtcctactaatgatgccgagaagattatcatggttcttacacaaggatgatatgcaaattcattaagtgttccatttaagaaaagaaaaaagaaaaaaaaaaaaaacctcttgtaccctagcagtttcatcttgaatactgttaaaaaaaaaaaaaaatacatctttaaaacacatgaaaggttttcatcctttagtccttcaatgtaacattattaaacgatgtcaaaaagtctcaaagttagcgttaaataacaagcattttctaaattatacattgaggagtctgatcttgaatccacaaaataaaacatcttttctacatcaactacaggaagtacatttttacctcaaactagtaaaatgaaaggttttgttgttgttttttgagacgaagtcttggtctgtcacccaggctggagtgcagtggcactgcagcctccgcctcccaagttcaagcaattctcctgcctcagcctcccaagtagctgggattataggtatgggacaccatacccagctaatttttgtatttgtagtagagacagggtttcaccatgttggccaggctgttctcgaacttctgatctcaagtgatctggccacctcaacctaccaaagtggtgggattacaggggtgagccaccatgcctggccattttttttttcaatcctgctcccttttgccttttaaaagctcaacattttataaatatttagcaaatgtttagctctgaagtaataaagttgatttttcttaaaaaattcaactagaactagaagtgaacatcgtctttttatactcttagaaagttatgtgtttctcatgaaaaaatgttcaccatcactggccatcagagaaatgcaaatcaaaaccacaatgtgataccatctcacaccagtttgaatggcaatcattaaaaagtcaggaaacaacaggtgctggagaggaagtggagaaataagaaaacttttacactgttggtgggactataaactagttcaaccattgtggaagactgtgtggcaattcctcaaggatctagaactagaagtaccatttgacccagccatcccattactgggtatatacccaaaggtttataaatcatgctgctataaagacatgcacacatatgtttactgtggcacaattcacaatagcgaagacttggaaccaacccagatgtccatcaatgacagactggattaagaaaatgtggcacatatacaccatggaatactatgcagccataaaaaagggtgagtttatgtcctttgtagggacatggatgaagctggaaaacaccattctgagcaaactatcacaaggacagaaaagcaaacaccgcatgttctcactcataggtgggaattgaacaatgagaacacttggacactgggtggggaacatcacacaccagggcctgttgtagggtggggggagtgaggagggatagcattaggagatatacctaatgtaaatgacaagttaatgggtgcagcataccaacatggcacatgtatacatatgtaacaaacctgcacgttgtgcacatgtaccctagaacttaaagcacaataaaaaaaaaaaaaagaaagtgatgtgtttcttcaaaagatgctgacgacgtcagacacactttttaaacagtttggaagctgtcttcagagacaaatgctttacaatcaatatttcatttaatcttcacaaaactcaaggagaaggtagtatataacttccattttacgagtaaattcagacagaaaagctaaataacttgcccaccactgcatttcagtaaatggcagagctgagattagagccaacatctatcggactctaaagcaccagctcttaattgcttcactttctatcattgttttgatagcaaaatagatgtaatctgatgatctcatagtgtatttacttttataaaacagtattaaatttatgggggtttaattaattattggcaccataaagacctgaaaccacctaagaaaataaatgctctgcaatagacagaagagcttttttaattatatgaaagtcttgtttttcaactctatcataccatttcctcttaagttgggctctttgcccaaaagtactctaaaattataattttctggcaaggagttttaaaagaagctgaaattttctcttcttccttcacccttggactctaatttttattatctaagaattttctccacttatcataaactggaaagtgatatgatttctttacatttcttgtaacaaacctatacaaaattaacaaacactgcaacatactccctatccctaagacatgttattacattcgctttcttaattactaattactcaaaaatcacaaattcagaaaatatagacaaatttgaaaatgctctaacatattcacgtcctattaaaataaatttgaaaattccctaacatattcatgttctagtaaaataaaaattaaaaataattttattagaaatatggacacctataaggctcatacattttaatccagttcgttgtaagtattctgaaataaccatacctagatttgagaactaaaaaaggcaactgaatctttaattgatttttttcttctttttgagacggagtctcactctgtcgcccaggcaggagtgcagtggcatgatctcagttcactgcaacctccacctcctgggttgaagcaattctgcctcagcctcccgagtagctgggactacaggtatctgccaccatacctggctaattttttttgtatttttagtagagacagggtttcaccatgttggtcaggctggtctcgaactcctgacctcaggtgatccacctgcctcaacctcccaaagttctgggattacagccgtgagccaccgcgcccagcattttttttttttttttttgtcacccaagcgcagtccaagctggaatgaagtggtataattacaagtcactgcagcacaacctcctaggctcaagcaatcctccaacctcagcctcccaagtcactgggacaaaggcatgcgccaccacgcccagctaattttttgtttgttgtagagacagggtctcaccaggtcacccaagctggagtgcagtggtacaatcacagcctgctgcagccacaaccccccaggctcaggcaatccttccacatcagcctcccatgtagatgggactacaagcgtgaaacaccacacctggcaaattttttttatttttagtttactttagtttgagacagggtctcactctgtagcccaggctggggtgcggtggcatgatcatcgctcactggaacctcaacgtcccaggctcaggtgatgctcccacctcagcctcctggctgtgaccacaggtgtgcaccaccatgcccagctaatttttgtatttttttgtagaaaccaggttttgccatgttgcccaggctggtcttgaactcctagactaaagcaatctgcctgcctcggcctcccaggtgctgggattagtgcatgagctactgcacccagcctaaaatctgctcttatcaacagtggtgttatttgtcttggattattttattttctatctttttcatttaaaatgacactaggtcatctgaaatatttagtggtgagaaaaaagtaagactgggtattaggattatagtgggtcaaagagcaaccagagcaaataggaagaacataaagataaaagtctgctctgaatagtctatatcacgtaatttgaatttatatatgcccaatttctgactcaaacttagaaaataaatgtgtagtggagagactatccagagaaaagagctcaaaaccaccagtgtcatcacttttggcagaatatccatagtttgaaagaaaaaatcagttatcctatctatgaataaaatgctattaaaaataacaggatattagttattaggatattagtctccaggttaggatcttgaaatatcatttcttactaagagaaaccacggctttttggagaaatggatgattccagatctaggacaagaagtatacaagatgggccccaaatatcacagcagacaacaaggaaactatcaaaaaccactagggtcatgttatctcctgaagagactcccactaaccaaaggtgagacaatttgcgcttcagtgaaagtgattccaatggattaaatccatcaagtatgtttaaatccatcttctcataatggcatttaaaagaaaaaaaaatggccacctttggagaaagacagggaactaattcgttatcttgaaaacttgtaaataaaaggaaagaatcaaacatttatcctgtctttcctttatcaacagtaccactgggtaactaaacagaagatgaggggaagttactttttataaaaacattccaattaataaatgaaagcaaaatgatgtatttagaatttcattatattgcaacacccactaaccatccacagccgctaacatcacaaaaaagaaagacaattagacattatgatattcccatggtcttgccaaaccccatctatatatatatatatatcacaatgcctaagggatcgaacttgagtctgctccatctctggatccagctgcacgtttgcagaaaatacagaagacaaaggaacatgttgaactgacctatattaagcaatcagcaaaatccaactctgggaaactagtacaaacaacctgggttctccaacaggaaaaggaaaaggatggaggactaaactaaagattaaaagtgacaactcatatcaaaactgctttttgggctgggtgctgtagctcatgcctataatcccaacacttggggaggccaaggcaagaccacttgagcccaggagttcaagaccagcctaagcaacatggcaagaccccatgtctacaaatacacaaattacctgggcatggtggccaatgcctatagtcccagctcctcagaaggctgaggcaggaggatcccttgagcccaggagggtcaggctgtagtgagctgagattgcactactgcactccagcctcagtgacagggcaagatcctgtctcaaaaaacaaacaaacaaacaaacaaacaaaacacaacctagagacagtgtttccctcttgttgcccaggctagagtgcaatggtgcaatctcagctcactgcaacctccacctcctgggttcaagggattctcctgcctcagcctcccgagtagctgggattacaggtgcctgccaccatgcctagctaatttttgtatttttagtagagatggggttttgccatgttggtcaggctggtcttgatctcctgacctcaggtgatctacccacctcggcctcccacagtgctgggattacaggtgtgagccaccgtgtctggccaaaacttactatttcttaatcatcaagactaacctacagtatctagcaatgcacatttgggttattactacacaagtcaggaaaatgattacttatagggaaaggccactgtgatctatttctcaacctgaggggtgattacaaaggtatctgccttataataattcaccaagccatacatgtgttctgtactaatgttttattttgcaataaaaagattttttttaaaatagcaggttaccagcacacctgaacatgtcaacacctaaaaacggctagatatgttttccattctctactctaactgagtgaaaacaataggataaaaatagaaatcaggccgggcatggcggctcatgcctttaatcccagcactttgggaagccgaggtgggtggatcacctgaggtcagtagttcgagaccagacaggccaatatggtgaaaccccatctctactaaaaatacaaaaattagctgggtgtggtggcacacgcccgtagtcccagcggcttgggaggctgaggcaggagaattgcttgaacctataaggcggaggttgcagtgagccaagattgcaccattgcattccagcctgggcgacagagcaagactccatctcaaaaaaaaaaaaaaaatagaaatcagtgtgcatcatttcctccctacccacttcctcttctaaaggaaccacttaatatcacattttaggccaatcagattcactttcttgggattatgaaattccaagaaagagactatagatatccaaacctgttctcccggtctttcctcattccccaagttgtttcaattcaaaacataggagccaggattgattctttttttcccctcattccccacatctagtctatcagcaagtccttcatttataactccaaaatatcgcaaatctctcaacttctatctccactgactctaccatctcaaatcacaaactattcaaatagtttcctaacttgtttctcttttattcttaaccctctacaatctactctacccaaagcagccaaaaggatgttttaaaaacataaactgcttaaaaacctttaatgacagcacacagagctctgacttaaatccaaattcctttccatggccggcatcattgaatccgtgcccatctctctgagctcatctctagccactgtcctcttctccaatccaggcacactggtgtcatttcaattcctcccacacattaagctctttcccacctccaggccttctcatagctttcccccctgcctggaatacttttcccttgctactcacatggataacttctcaatgtcaggttacaacttaaatatcaccttctcagagaagcctctgccaactgccctattaagcaggtttcaccatctttctctacacactacttatatctttcatagctcaagctacaacaagagtgtatgttatatgagggcaaagaacccacctgtttcattcaccaatgagcatctggaatgtggaaaacaattaataattactgaatgtatgaataaatgaggaaatgaatgaagtaaaggccgaatgccaattttgccatgagtagtgatcagtaagtaaagaaagccagttttcagaaagaacagagcaacacaacagagaacaggagactatgtggcttggttccataaacagagtcaagaaaattagctgccaattataaattataaatgtgtgtgtgtgtgtgtgtgtgtgtgtgtgtgtgtatcaagatagcagaaacatctgaaaaatttactcaattcacctctatactaagatgtctggtattatataaatctataaactaattcagaactcaaaataatactacctaaactaattatcattaatgttaacactttgtaattctcattttgctatgagtcatttttcaagatatactcctatgatgtactttcagaaattcaaggtaatcttcatgtcgatattcacggtatgtatgcaaacaatgaattttttttgttgtttttttgagacggagtctctgtcgcccaggctggagttcggtggcgcaatctcggctcactgcaagctccgcctcccaagttcacacgattctcctgcctcagcctcccaagtagctgggactacagatgcccgccaccatgcccggctaattttttgtattttgtttagtagagacagggtttcaccatgttagccaggatggtctcgatctcctgacctcatgatctgcccacctcagcctcccaaagtgctgggattacaggcgtgagccaccgtgcccagcccaatgaacgtttttgagacagggtcttgctctgttgcccaggatggaatgcatccacacaatcatggctcattgcagcctcaatctcctgagctcaagcaattgtcccacctctacctcccatttatgtaaatgtgtgggtctgtactgagtctcagtatcaatgaatttttttttttaaatgttgaaagccagtaatatatgatggcctgaagtgttcctagagtcaactaaagactgagtttctctagttgacatgcaacagaagtttgtttaccggaagtattgcaaattttattgtcgcactccctctctccaagaaggaagagccaactgactattcccatcagcacggcctaaagcaatcctaatcaagttaatgccaccctaaattaaccaagaaaagccaaagggaagacagcagatgctttagggaccaagttgttaattcagagatgctcctgtttggttggttcttttccccttggactaactactttgaatattttgtccacttgcctacctctagaattggaaattttccctagggccttcctctgagtctgctggggtttttttaagagttcttagagttcatcttctcaaagacaactccagctctctatttagtcaatctctctgatatacacacaattttactttccaacattccaaggaaacataaattagaaatatacacataaaatgacatccacccctcttctccctgcaataatatctttgtgatattcctactatctacttaactggtgtgttgctttctctcacccacttccattcataagcgctgagagttatctgctatctctctccattcctaattcctggcctgagatccgggctacagatgctacaagttgatgtgggctcttcatgctgaagaattcatgagtactttctgcttaactcctctatattctcaacccgatccctttgctttttctttccataataatctgttttctgatgggtaatccatccaaacactcatttgcccttatgaaattagtgttttctagctttccatttgcgtgaaggacccctaacatatgacttcaaccttcaattttatttcccccaaactaccctttcacactattaaaaataataataaaaaattgccacagaatccaactatagcttaaattaaagaactcacctgtcttgagagtaagtatgcttcaatagcttattcttttactatccttttagtgttttcattgttcaatgctaacctgccctccaaccataccttaatcaacgaattacacattttaaataactactaacactataacctatttgaggaacaagcctatctggtaaagtgtctcactccagcagtgatattctgtcctctctttgacaagtattaaatatattttcatgctgcccacctgtctatcatagagacccacctcccttctatgaaggttccacctggtgaagagcccatgttttctggtcatttacctttctacctatcaaagctggactattatgtggtcatttttctctcagctagcagttcccctataaaaaatccaataaattcggctgcgcggtaactcaagcctgtaatcccagcactttgggaggccaaggcgggtggatcacgaggtcatgagatcgagaccatcctggctaacacggtaaaaccccatctctactaaaaatacaaaaaagttaacctggtgtggtggcaggcgcctgcagtcccagctactcaggagggtgaggcaggataatggcgtgaacctgggaggcggagctcgcagtgagccgagattgtgccactgcactccagcctgggcaacagagcaagattccacctcaaaaaaaataataaaataataaaataaatccaacaaattccatctaaccaaaatgctaattaatgatcatttaataaaggagtccccaactcctttacagcacaatacagtggaccagtactggtccatggcctgttaggaaccaggcaacacagcaggaggtgagctatacgcgagcattaccgcccttgctctgggctccagctcctgtcagatcatcagtagcattagattctcataggagtgcgaaccctattgtgctgtgcatgcaaggaatctaggttgcacgctccttatgataatctaactattgcctgatgatctgaggtggaagtttcatcctgaaaccatttcgcccccaaccaaaccatctgtgcaaaaattgtttcccacgagactggtccctggtgccaaaatggttggggatctatgatttaatgaatttcccttcccagagggaaatccttttaataacgactttggccagcttgggcaacatggcaagacctcatctctacaaattaaaaaaaaaaaaaattaggtatggtggtgcgtgcttgtggtcccagctaatcagggaggctgaggtgagaggatcacctgagcacagggaggtcaaggctgcagtgagccatgattgtgccactgcactccagccagggcgatagagtaagacccaatctcaaaaaaaaaaaaaaagttaaaaagaaaaaaaaggacttctgaagacctcagtgacaagtatgttaacgaaatctaaggaatctaaaaactactctggtacctcaagttggtgacatgggtgaccacatctattgcctatgtttaacacaaaccttgttaaggagaccaaatcaatgaatatgagggtgagaggtgccttaaaaatcatctaggtctctgagtcatgattcttgaactgggctacacactggaatctccaactcccagaggagaagaagatgcccaaagaagcaaatttcaaagtcagtgacaaggccaggcctaatacccatgcctaacattatgtgttgatatgtgtacatacatacatatatatatacacacacatacatacacacacacacatacacacacacatatatatgtaacatactaaaaatataaaggcatgtatgggaaggacaaatatccaattcatgtcagtgattaccttttgggggatgggaagggagtgtaattgagaagaaatacacatggtggcttcaaatgtattggtaatatttttattaatatttcttaaactggatggtaatacctaagtatctattaaattaggctctgttcttttttctttttgttttgtttttatttttatttttgtttctttgagacagggtctcactttgtcatccaggatagagtgcagtggcacaatcatagctcactgaaacctcccactgctgggctcaagcaatcctcccacctcagccccacaaagtgctgagattacaaggcgtgcaccatcgcagtaggccctcattatcttctggatatctaaaattttgtaataaaatagaataaaaagatggtatataatcaaatgtatatcacattaggaattcagtgaaatatctcaggctagaaagtactcagaaaacatacttgatgaggtaggctttgatggaagaataaaacatagattattcttcaggcaaaaagtaacacaaacttttctaaaggaaaaatgtgaataaaggtaaagctgggagtacccacagcctataacataaataaagaacaacgggggccaggcacggtggttcatgcctgtaatcccagcactttaggtggccgaggcaggtggatcatctgaggtctggagttggagaccagcctggccaacatggcgaaacgttgtctctactaaaacacaaaaatgagctgggcgtggtggcgcccgcctgtaatcccagcctctcaggaggctgagggacgagaatcgcttgaatcaggatgccagaggttgcagtgagccgagattgtacccctccatctcaaaacaaaacaaaatagttttgaaaaccactggactaaagcgtccagctagaaggtactgctgcaattcaaaagtgagggtcataaaaccatggaatgggttttatggggtagtactcttgagaaagaaaacagaaaaaattaatccaccaactttttaatagaaaatttgataggctatagtgacaaactagatgggataatgaaagagtaagacctacctgaaaaaataaaaaatgccaactgagcagcagcttctagtcatacttgaacatcaacgacatcgataaggccatgtaaaagtcagcactaaggaagtgttattcaaggcagaaaagcaaaatggcacttttataaggattaagagcagaataagcaacagagaccaggagattacagaaaaagaggaccactacatcatggaatgataagaaagagagtttcaaaaagagccatcactgtatacaacaagagggtgcacagcctttgtagccaatcagatgcagaattctggcactttctccacttgaccaagttatttaacgtctttgagcctcatataataaggaaaacataagttaacaactaacactgttgaacacataggggcttcaaatatatttgtcaaattttatttcttaagctcagtcgtgatacataaatatttattaaattagtccccattatcttttgttgtttttgttttgtttttgtttttttgagacagggtctcgctctgtcccaagtgctttacatatcacctcatttaatccccacaatacatttcacagatgaagaaattaaacttagaactagcataataagtagcagagccaggattactatttcttaggatttaaataatgtatacttaaatttcctggcaaacaggatgacctcaaaacgagtagctatatttcattattaggagataataatcaataggggcaaaactgccagtaattcctgtcatagccttccatgtggcaaactctctcaacatcctcatctataaattaggattaatgcctataatccaatctactccatagggttgctgtgaggattaaatattatgaatatgaaaattctataaaaaatgttgagacattcaaatatcagggattgctgtcacatatctttcgccttcaaaaatgcttttgcggcatttttgttcactacttcaaaataagactctgaataagctaaaaataagtctgttaaaagtgcaaccaccactttgaaaagtataaatcaccacagaattgctgcctacacctgcccctgactcctccaggttctctaatgtctccacaagggcaaggattctcttacacctataatgaaactctgataacttacagtacagctaatcaatagagagctgcacttcaattcagagttgttcaaactggactactgtgttttctcagaggtgctccttccagttcttccagaaaagaaaaaagtgcccaattctcttatattgtattaaaacggtgcccaatgagtagaatgcaggtaacttacaaaatgctagaaaagaatctatcaattgacttgctcaagtgctctgacagcaggtcccttttggaaactccttcacgaccccccctttttttcacctgaacagatggcttccaggcttcaaggctcacatgtctagtcacacaattcacaatagctcccaaagttcctaacttttcaattatcccatgttcttgaacacacctttcatctaaagatctctagctgtcaaagcatacgaactctttaatcttcacaacagcactatctgagagattactatccttattttataagttaaaaatgaaagactgaggttaaatattttagcaacatcaaacaattcgttaattcattcttggggagagaggaatacatattatgaacttctgtcaatggacaacctagatttggcttcctaagatcattgcaaatattagctcaaacacatcccactcttgtatgcatacatttccaacacaggtgtcaaagattaaatataaactattaataacagtaaataccataccaaagcagcactatttttacacgcaaaactatattgggggagggggttctaatttaaacttcccactgtcttgcatccataaatacttttgaacttgagggggaagggggaagaacacctgtcagagcagcacatccacaatgttttacagactgtgtagctattaatatttaattcctcccgccccgggaggtcaggccgcagggagcccggcgctgcccacccgactttccacgcgccaggcctgccggccgcaggggaggctccggctcccgctcccctcaggtcccctcgcccgtggacagacgcggcgggacactcggacccgcctcccgacctcagcgcgcccggctcggggcccggcgggcggggagaggctcgcagcagggcctggcctagccacccccgccccgcggccgccggcgccgcttccctccttcttcccgctccccgattcgttacctcttaggcgccggcggctgctccatggcggccggggacagagagagggacctggtggacggcgaaggccgaaaggaggaaaggagccggggcaccggccggccgagcctagggcaccacagagggaaactctgggaactcggaccaactttcccgtaactccgcggcggatctccctcccgcttaggagcgcggctcctcccgccccgccccgcccccggccgccccgccccgcccccggccgccccgccccgcccccggccgccccgccccgcccccggccgccccgccccgcccccggccgccccgccccgcccccggccgccccgccccgcccccggccgccccgccccgcccccggccgcgccggccgccagcctgcggcggcggcccagagaaggtggacggagccgggcaccgcggcggggggcggagcctgccgcggcctgggttggcgggcggggccggtgccgcggcgggtgggcggggccggggacgaaggcctggctggccccagagccccgtgaccgggaaaaggagaaggttccgctagagctagggggcgaggccggagccgctctaggctggggaagggcaagtccctctgagctggcccagagctccgcccctagcctgccctcactacggtttgccctgatccaatttgactcatttctttggctttcccaacgacacatcctaacatcgtgtgaatccgtttgaagtattactttctcactgcccacgcttccctctctagttctgtttataattatcggttatgttttcccccagccatttgacatgtgtaggccacagtactagggatacttctggaaattcttgtttgatttttattgtggacaagctcctcgctacatttcacaataattacatctaattaccgagaaaataattcgtacagtgagatctctcggtacaccaaattcagttgcactgggcccttgcagctgtcccattgggtaacctggcaagcctgtcacaaattatgctgccaggaagaatactcaagaaaagtttgtttcctcccctctttggtcctctcccccaacctgattccagcagccctcatcccattgtaatctgaccactgcatgcatccatattgtgggtatacttttaaccttaaattccatatatacctttcacataacaatatacagctgctacatgagtttacttgtttttgtcagaaattgtcaagatgggccgggcgcggtggctcacgcctgtaatcccaatactttgggaggccaaggcgggcggatcacttgagctcaggagttcaagaccagcctggccaacatggtgaaacctcgtctctactaaaaatacaaaagttagccgggcctggtgatgcgcctgtactcccagctgcttgggaggctgaggcaagagaatcacttgaacccgggaggcagaggttgcttttaaccttaaattccatatatacctttcacataacaatatacagctgctacatgagtttacttgtttttgtcagaaattgtcaagatgggccgggcgcggtggctcacgcctgtaatcccaatactttgggaggccaaggcgggcggatcacttgagctcaggagttcaagaccagcctggccaacatggtgaaacctcgtctctactaaaaatacaaaagttagccgggcctggtgatgcgcctgtactcccagctgcttgggaggctgaggcaagagaatcacttgaacccgggaggcagaggttgcagtgatccgagatcgcgccactgcactccagcctgggtgacagagcagaccttgtctcaaaaaagaaaaagaaagaaagaaattgtcaagatgtagagttacatagaattttcttggaggttagaacaataaatatgaagagaatgttaaataaaggaaaccaatttgaagagaatgttgaataatgtgaatatttgcccaaattaaacttgactattagcagctaatacaagtttagtttagtcctctttttgcattattttaagtttcactatgtaataaacttacactattttcaaaccattatattctttcctaaatttagttattttaagaccattcatttttgaaactctaattctgagaacaagaaaaagggttttttttgttttgtttttttgagacaggttctcactgttccccaggctggagtgcagtggtgtgatcatgcctcactgcagcctcaacctcccgggctcaagcaatcttcccacctctgcctcccaagtagctaggactacaatgcccggctacaaaattttatacttgtttgcatttattaaagatccacagtctgactgttcagaaataacaggacaacaacaattttaaaacctaaatatttaaaatgttaaagctgagaagaatctttgaaattactccactctaacccccccaactctcatcttcacttccatgccatactcccagctttttttttttttctttcactcttgttgcccaggcttgagtgcaatgccgtgatctcaggtcactgcaacctctgcctccctggttcaagagattatcctgcctcagcctccctaatagctgggattacaggcacccgccaccacgcccagctaatttttcgtgtttttagtagagacagggtttcactatgttggccaagctggtcttgaactcgtgacctcgggcaatccacccacctcagccacccaaagtgctgtgattacaggcatgagccactatgccaggctcactcccatctttttgtgtttcatcagagaaacctcttgaggaaggctgggcgaggtggctcacaccttcaaccccaacactttgggaatccaaggcaggcagatagcttgagcccatgagttcgagaccagcctgggaaacatggtgaaacccatctctacaaaaaaaaaaaaaaaaaaaaaaaaaaaacaaaagaaatagctgggcatggtggcatgcacctgtagtcccaactactaggcttcagtgagccatgatcaagccactgcactccagcctgagcaatagagtgagaccctgtttcaaaagaaagaaaagaaagaaagaaagagagagagagggagggagggaggaaggaaggaaagagagaaagaaagaaagaaaataaatgatccctgaattgttttaccaacagcaatctccagggagcctttcccagtcaaaccaccagcatcatcacccactatctgtcacatttaagttgtgatagagatactgtcttgtatatatgtccgtagtaccctgtgttggcttttgtatgaaacttgtcacactatattgaagttctgtttattaggctgtcatcccaacccaactatgagttgattgaaagttgagccatatctttattctctataccttgcatagcaagtgcctgataaatcgtaagggcactgggctggatagcatccttttggtcctgcagattcattctccatccttttccatctgctctctgctctgagagctaatatgtatggctgacatcagaagccccttggcttatggttgggtctgatgatagacccagcaagagatcatctgagggagaaaggagggtgaggtcagactattggatgccctggttcccttcctgtgaggtgacctagggctagctgtgttccagagaatcatggctctttgcaaggcaaactactctacctaattattcctccttccccttgaccctttgggcctgagtatcatggctgctctgctattccctgggtttcttctctatgtcctatgttcccctaacctcaatcctcaactgatgctttgtaaattaaactcttttcaattgacactaatttgattgcaccttctaaagggcttatgatcttgactgatacacccataaagaattgtggaagtaggaggaatactatcagaaaataaatttctgaggtctttcctcaacttgaaaagggagaagactaataattatcatacgactccaataggatcagacactaggcctccattttctcattaaaccctgaaaacaaccttgtgaagtagttatttccattttataggtgagaaaactgaggttcaaaagtgtgaaaggagttaccctaggataaacagaatgtctgtgttctaatccaggcctttaagactccaaagctggaacttattccactgtagatcagtcaacaaatatttattgagcacttaagtatgccaggcactgttctaggtgctggatattcatcagtaaagaaaagagacaaatagacaaaaatccctgccttcaggggatttacattctggttggggaaacataataagataaaaaagtacctaatgggtcatgttagagattgaaaactggtaaggaagaaaagtgaaatggaaaaagggaatataaagtggaggggaagaggccggacgtggtggctcatgcctataatcccagcactttgggaggccaaggtgggcggatcacttgaggtcagcagtttgagaccagcttggccaacatggtgaaaccccgtctctactaaaaaaatacaaaaattagctgggtgtggtggtgggcacctgtagtcccagctactcaggaggtcaaggcaggagaatgcgtgaacctgggaggcagaggttgcagtgagccaagattgcgccactgcaccccagcctggacaacagagcaaaactctgcctcaaaaaaataaaaagtaaataaaaataaagtggaggggaagggatgaaattcaggtaggatggcaaaggaaggcctcaacgagagagtgactaaggaagtggaggccagagccatgcagatagcatgaatgtgaggccaagggaatgttagaatgtgaggccaagggaacaataagtgctaaggcccagaggcaggactgtgcctggtgtgttgtgtgttactcaataaaggaattgtttttctcctgaattacttagaagaagaaaaaaaaatgcttcaagcttctgttttactttgtctgttgaaaaccaacctgaagattccaggaagaaagcatagaagtcaccattcaaactgcaaataagaggcagcagcattcatgaacaaaggaaagctgcaggaacatttgagatacaggtaagggtcacccagcttcacttaactgtgaaagtaaggtaatcggccaggcgcggtggctcacgcctgtaatcccagcaccttgggaggccgaggcgggcagatcacgaggtcaggagatcgagaccatcctggctaacaaggtgaaaccccatttctactaaaaatacaaaaaattagccaggcgtggtggtgggcacctgtactcccagctactcgggaggctgaggcaggagaatggcgtgaacccgggaggcgaagcttgcagtgagccgagatagtgccactgcactccagcctgggcgacagagcaagactctgtctcaaaaaaaaaaaaaaaaaaaaaaggaaagtaaggtaatctgtttctgcttccaacagctccatttggaatcgagattaaatatacactttaattatactagcaaacagctgattacaattctcagttgagtgctctaagagaaatgggaaagaaatctgcaatttgagatccagtgcctttgaataacaaaaagcatacgttctttgtaactgaatacgtacaccaccatgtttaaaatattaagatagaaacatattaaggtaaaaatttttccttgtcatactagttgcagctattcattgaaactacaactttgtatttctcttaggctggagtgtagtgacacaatcaaagcccactacaaccttgaactcctaggctcaaggaatcctcctgcctcagcctcccaagtagccgggactataggcatccaccaccatgcccagctaagtttacttttgagttttgtagaaacagaggtctcactatgttacccagactggtctcgaactcctggtctcaagcaatcctcccaccttagcctcccatagtgctgggattataggtatgagccgccatggccagcctcatttttatatttgttggaaaaataatatcaattaacaaatgttaattaatcttttctgctataataaggaacagtttggggaagagagaaatcactaatcaaatatattgtgtaggtttttatttgcaggaaaatttggaaatgttttccttcaagaggtaactttacaaaacattttctcttgatctgtttctcttttctaacttagttttatagttagtttgaaactagcatgttgcatttgaatttaaccactgtcctcctttatcataacaatcttaaactattatttaacttgtttctcagaccacactgtgaacctcttgggaataaggacagtatcttcttcctatttgtcatgtcaggagtctagcataactattagctacaagtaacaactcaaaatgatttttaaaacaagaagactagaaggaggtgtttctaggtttgaataattcttcaatttacttccatttcttgttgttgatttaagaatcacaaggttcataaatttggagtggagagctttatttgttgtaaaaggttgcagcctgcaggctggccatcccacaatctgggaagcatagcctctgtcagaaaccggaagcaggcattttaaagaaggaagaatgagacggattggctaagtgtacatattcaataggttatagtgcctccttttcgtgaaaaaaaaaaaatatatatatatatatagatatctatatatatattcacaaaggcagacactcacatgcacaataagcaaacatgcatattatatatgtcccatgttcactttggggtggagatttaacatttacatgcattaaaattaagctatatacttcaaaaggtgaaaccgaagacacagaggcatcctgtgtgcatcctctgtaaatcagccacaaccaatccatggtggtcacttaccagaaaggaatgctggtcagttgtattgtcaaaaccacaaaaaaaggagtccagcaagtctttcaaaaggaatagttcctgtttaactcaggaaagaaagtctaaaggcaattagcaagggaagaagtataatgaggtatgtctgaccgcctatcctgtcatggctgggaatttagtttttaaggtttctctggggtccccttggccaagggggggtccattcagttggctgcggggcctaggatttaatttctatttctcactgctctgctgtgcacagcagacctagttgtctcctcaaactatctccctcccctcagaggacaaatatggccaccaatgttccaggccttacatggagacatgacaatgcccagcaccagaagataattagttatttctgaatacaacttttataagatggtaggaaaagtctattccagaagcccctctgcagacttccctacatgtcctattggctagaaatgtgtcacagacatgttgatgaaaaatgccaaactgtgtaaaatatttgaagaggtttattctgagccaaatgtaaggacaatgacctcaggaggtcctgagaatacgtgcccaaggtggttgggttacgcttgattttacacactttagagagacagaaactacaggcaaaaccataaatcaatatacataaagtttatattggtgtggcctggaaaggcttctcaaagttggggggtgcagggggagggttccaggtcataggaggatccaaagattttctgattgacaattggttgaaagagttaagttttgcctaaagagttcaaatcagcagaaagaaagtcttgtagttaaaataaggggggttatgggagccaaggttcatgttatgtagatggagcctccaggtagctgacttcaaagggaatagatggtaaatgtctcttatcagatatttaccagttaaatctctcctggatcaggaaaagatatggaaagggaagaggattctctagagaaagtaaatttttcccacaagagacagctttgcagggccattccaaaatatctcaaagaaatatatttgggggtaaaaatactttgatttcctttagggcctgttatttgtcatgtgatgtgaccagaggcagtttggagttggtatcttattgctataaagagtctgttctgtcaatctgaggattgctattttaatgttaacactggtcagttgtgcctaaactctacttccttcataacctgaactagtttttcaggtttctttggaatcccttggccaaaagcgggtccatttagtcagttgaggggggttagattttatttttggtttatagccccatctctgacaaagaaaaggggataaccaaaacctgttacgaccatttgtgattcaccccatggaggtgggtttagagttgaggctgggactagacttccctgaagtttatggcaaagagaaccatgcagagaagaactgagaaaaaaaaaacctttatctgagggatgtgaatctttaaaaattatcaagcccattgagacagcaatcacattctactcccctgcaaccacctgtttagctatgtattcatctcttaaaactgcttgctattgccacaagtagctataagtgtacctaataatgtagcaccagacaccataagccacactttatagttgaacaatgtatagcaaatcaatagcttatgttattttaatatacattcttggcaatggaactgcctcttctttccctttaaaattctacttataactgctgctaactggagtgcatattcatggcaacttgaatctgtgctcccaggctgcaatcttccaacttgacccaaataaactctctacttatattaattttgtctccacttcttcctttaggtcaacagaacaaaattggaatccgattatgtagaaaaaatggggaaattgtaattagacaacagactacaatgtctgctacacataagtactcagaacgttataatcaattaatacatgtttgttggataaatgaatggatttccaagcaaagaaaacataaggaggctaggaggtccaagatcaagggcctggcagattcagtgtctggtgaaggccaacttcctgattcatagacagccattttcccccgtgtcttcacatggtagaagaggtaaacagcttcctcagacctcttttgtaagggactaattccattcatgagggtagcccttatgacttaatcacctccagatgccatcaccttcaggggtaagatataaggaatttaaagagacaccgtaattcataaactatatattttgtcaaccttaaatgatgagattcagaaaatatgattaagtatagagtttactccagcccaaagcttgagaatgaccttctgatgaatagcagttacaagtggggtgtaaggaaaaaagaagaggcaattcctaaattgttaccaggaatttacattgaaataacataagctcttgattggctattcattttttgtttgtatcacaaagttcaggaacataaagatagtgggtgaggcagctagacaggaacaaaatgcttttacacagttgcccctgggcatgggttggaagaggcatgactgaagttccatactcatgactctctgggcctaagagagtcattttgcatacctcacatagctcagactactctgagctatttttcttttctcataagagaaaatgagtatgccatttgtgattttgtttcttctcaactctagattgatccttcattgcctgctctgttaaaatagagctaggtcctttaagtaatttttctttaccagatggcatgatggtaaactttgtcagtggacagcactggagagacattgcaaaagaaaaaggtttccttcctggtgggcatatgttccctctgcaggctcctgcacccagggctgcttttctgggtcctactaaatgggcaacttcaacattgtccagccaggtcctgcaacacatgtaccttcatcagcctttggttcctgcagtgcagagcagcaacagcacccagtggccaacagtttccttcccaccacaccccactcctccctcaggcaattttgctaccgagtgcccgcattgagacacctcaccatgaacagctttcccagaaacctaagaggaagatttctgcaaagttccagaaggaagatttccagcaagttctgtcagcatggcactacagtaacttctctgccattcagtgagacacagctgtgtcctcttcaacaaggtctggatctcaatcctggggggcctcttccttggatgctctagctcagccccagggaggagtagctgttattcctgttgtcttagtcagttcaggctgctataacaaaacatcataaactgttggcttataaacaagagaaatttgctgggcatggtggttcacgcctgtaaccccagcactttgggaggccaaggtgggcagatcacctgaagtcaggagttcgagaccagcctgcccaacatggtgaaaccctgtctctacctaagatacaaaaattagccgggcgcagtggtgggcgcctgtaattccagctacttgggaggctgaggcaggagaatcacttgaacccaggaggcagaggttgcagtgagctgagatcgcactattgcactccagcctgggcaacagagtaagactctgtctcaacagaaaaaaaaaaacccacaagagaaatttatttctcacagttctggaggctgggaggtccaagatcaaaggtctggcagattcagtgcctggtgagggccaacttcctgattcatagacagccatctttccccgtgtcttcacatggtagaagaggtaaacagcttcctcagacctcttttgtaagggacaaattccattaatgagggtagccctcatgacttaatcacctcccaagtccccatctccaaagtcaccaccttcagggttaggatttcaacatatgaattttggaggaaaataaacattcaaacaatagcacctatattctttagaggtgtctttgcttcttactagccaatcccttgttactccagtcctcagttatagttaataattctttatattaaacttttcctgttcaaataactgtggtctctatctcttgtggtttctgtatcagattggaccttgactgagacagagagtaatagcaaagaatcccaggccccactataaactcagaaaaatgatttagataagatcagattgatttcactttcagttcaacacataattatctacatcagcagatctcaaacttttctgtctcggtaccattttacacttttaaaaactatggagaagcttaaagagcttttgtttatgtggattatatttatcaatattaagaaattaaaactgagaaaattttaaaacacaagatacataagcacacatttcattaggcatcagatcaatgatatcattacatatccatgtggcatctggaaaactccatcatacactcatgaaagaaggagactgaaaaaggcaaataatatttaaaccttgtttttaaatagttttgaccttgtggaccccttgaaatggtctcagatacccccggaggtacctggatcacactttaagaactattgatctaaactaactttatataaacacaataactaagacctatgaagggaaaatatagaaaatatggcccttgccctctcagaactgcttagttgaagatatagagtatatattcatgaaagagtaaaataacaattcaattctgtatgtaataaactatcagtaagttctatcattcagaaaagtgctgtagttcaggctgataacaggctggagctcagcaaaaaaaaaaaaaaaagaaagaaagaaaaaaatggctttcattttataaaattcaccctccttatacagtagttacaaggagaaaaaacgtttcctttatgtacaaacctaagttccagaacaagctgaagatctctcaaaacacagcaatgattggctaagacactaaacacagccacagagctaaggaagagaaaagaaccaacactaagaatctgaaagactccataagatgaagccctttcatagtgagtctttagttacattgatataaggaaacttgtccaggtatggtgactcacatctgtaatcccagagctttgggaggcccagacgggaggatcccttgaggccaggagttcaagactagcctgggcaacatagtgtagacccccatctctaccaaaaaaatgtaaaagtcaactgggcatggtggcacacacctgtagtcctagctacttgagaagctgacatggaaggatcacttgagcccaggagtttgaggctgcagtgagctatgattgcaccactccactccagcctgggtgacagagcaagaccctgtctaaaaataagtaaattagtcttggtgtggtggctcacacctataatcccagcactttgggaggccaaggtgggtggatcacttgaggttaggagtttgagaccaacctggtcaacagggtgaaaccgtgtctctactaaaaatacaaaaaaaaaaaaaaaaaaaaaagtcagatgtggtagggcacacctttagtacgagctactcgagagactgaggcagaagaatcgcttgaaccctagaggcagaggttgcagtgggccaagatcatgccattgccctccaacctaggtgacaaaatgagactccatcaaaattaattagttaaaaaatatataagaaacctaaactctataaactaatgtttcttgctttaatcatttttctttatatatttttgatctttcaatttctttttattcctgcctgtggcctctatgaataatttctaatgtgtcttgactgaactaagcagaaagaagacttgtttacttctaggcgaggagagttagggaagtaagaatacccctagataaatgtgtactggtggcatcagttaatgctgttggaaaacagggcaatgaggcctagagcaggagcgaaaaaagaggagaggtagatgcttagtagacagagagaagctgcagtaaactcagctgccctaaggccagtctgagcatgtgatacattcaaagtaagctcaaattcaattgcaaaaagtttggaaagatgaaaatttttactaaaaatctcacagaagtgccgagggaggaattgtatgcatattaacacagcaaaacttcccaaaaatcctctttaccggtctttttccctaaagttttcctgaaaacctgcccaaataacttctccaaataacttcaccaaactctcaaggttattccattttctcatactcacccttctctccctccccgcaatcccgcccccaccctaccatcgaggccgtttaccttccttggctattacttcaagacctttcccccaacacacaaaataataatttaaccttcttctttgtttttgttttgtttgtttgttttgtgtgtgtgtgtgtgtgtgtgtgtgtgtgcgcttgtggcttttttgtttgtttgatttttgggggggggcggtttgagacaaggtctcactctgtcacccaggctggagtccagtggtgtgatttcggctcactgcagcctcaaattcccaggctcaggtaatcctcttgcctcagcctccggagtagctgggactacaggtgtgcatcactaggcctgacgaatttttacaattttttgtagcaccagggattcccactatgttgcccaggctggtcttgaactcctgggctcaagcaatcctcctgcctcggcctcccaagtggtaggactacagcatgaaccaccatgcccagactaacctcttccttaactcaacatagatggagagataagaaatgaaggatccttccttcagtgggtgggagaagtaaagggagaaagactgaatattcaaactttaatatttttgttcctttcaaacattctttttaccaacatttattcattaagttgccagacacagataatgaagtgtggtccctaacctgacactatggaatatccatccccattacaatcttctttttgctctttctttggaattcctttccaaagggagtgattcccttacaaaaggtaattttttgcttaataaagtgattattttacaaaaaattatccatggaatacttttacgtggttaatttccctcaggtatttaaactacgatttcaatctcagtctttaggagaaagagggtaagatgactgtggcttctaaaatttcctttgaaacaaagtcaaagatattaggaaagttatctcaggggcaccttgcgaataaatcatcatccaagggttttgagtaactcaaaagtaaaaaaaatagatttttctgccatataatcagttgttataaaataccgtcgacaaagaactgttgaattatctctttatatttagccacaaataaggggagaaagtaatagagaagggtctgaacaccacagatttatgcttagtaaatggaaattattttgaaaaaaataaagagtaagggcattaaaaatataggctgggtgccgtggctaacacctgtaatcccagcactttgagaagctgaggcaggtggttcacttgaggccaggagttcaagaccagcctggccaacatggtgaaaccccgtctctactgaaaatacaaaaaattagctgggcatagtggtgcatatcagtaatccagccactcaggaggctgaggcacgagaatcacttgaacccagtaggtggagtttgcagtgagccaagaacgcaccactccactgcactccagcctgggcaacagagtgagactctggttaaaaaaaaaaaaaaaaaaaaagaccagcctcggcaacatggtgaaaccctttctctacaaaaaatacaaaaattacctgggtgtggtggcacctgtctgtagtctcagctactcaggagactaaggcaggaggatctcttgagccctggaggtggaggctgcagtgagcatgatcacaccactgcactccagcctggggcaacagagtgacaacctgtctcaagaaaaaaatgtatatatatatatatatatatatatatatatatatatatatatatacacacacatacgttttatatatatttatatacacacacataacttattaattcctatctgtattaattgcctattgccgaatatcaaattatccccaaatgtaaccatttaacatttattacctcctagtctctgtaagtcagaaatccaggtgcaacttatcaggacccttcagttcagggcctctcaaaaggctgcagttgaggcaccagccctgtgtctctcccaaggctttagtcaaggtgatggccagggccatagtcacctcaagatttaactgggacaggatccacttccaagctcattcaggtgtttttggcaagattcagttcctcatgggtgctgaactcaagacttctgttccttactaccagttggcctttgagaggcccctcaggtcccagccatgtggccgtctctagagggcagcactcagcatagaggctggcttcatccaagtgaacaagtggagagaagacaagagagcaagcaaaatggaagtcacagtcttttgcaacctaatcagagaagtggcatcctattatttttttctctgttctatcaggtagaaacaaatcactatgtccagcccacactcaaagagagaggattacacagagcttgagtaccaagagataacttttgggagggagggatatgttcattgtcttgattgtggtgatggcttcacaaatgtgtatataaatcaaaacttatcaaacaattgatgtacaataaactgcacttgaattatgtacagtttattgtatgtcaattatatctccacaaagctgtttcaaaaataaagcattattttatctgtgtgcaaaactgaggttctttaaagcaggaactatttcaataattctaccatttcaccttaagaactctaaaaaaagaaaaaaaaagtacagggtctagcatggtggctcatgcctgtaaccccatggctttgggaggctgaagtgagaggattgtttgagcccaggggttggagattacagtgacctccactgcaccccagtctgggcaaaaaagagagacctggtctcaaaaaaaaaaaaaaaaaaaaatttaaaaatgtaaaaaataaaaataaaaagtttggacttgacagttctatggaaaatggaaaaagatgaaaataataatagtaataaaaaatacaaggttgtctactgcagactataagaaaaataggacttcaacaatcaggaaagacaaagtatctttctaatccagtggctctaactttagtatgcattaaaatcacttggagaatctgcatttctaagttttcaggaaatgttgatgctgctggtccagagaccatactttcagaatcagtgttctagttcatcagcaataatcaactagaaattgggaaagaaaaagatagcattcacaaatataacaagctccataaaatacatagaaataatccaaaagaaaactatataaaacctatatgaattttaaaaaaaatagtgaagggcatgcaagaagctctgaataaaagatataccatgttcctaaatgagacgatgcaatatttaaaatttttaaattctccttgaattaatatataaatttagttaactgcaattttttaaagtctcaaaaggaccttttacagaatttaacaagttaattctcaagttaaaatggaaaaggaaatacataaaaagagccaatgaggttttgaaaaaatgagcaattaagagagacttgtcctagcaggtggcaaaacatggaataaaaccatggaaattggccagccttacacctataatcccaacactttgggaggctgaggcaggcagaccgttagaactcaggagtctgaaaacagcctgggcaacatggggaaatcaagtctctacaaaaaaatgcaaaaaattagctgggcgtggtggcatgcgcctgtagtcccagatactcaggaaactgaggtgggaggatcacttgagcctgggaggttgaggctgcagtgagccttgatcacaccattgcactccagtctgggtaacagagtgagatcctgtctcaaaaacaaaacaaaacaatggaaattaaaacagtgtggtattggctgggcacagtggctcatgcctgtaatctcagcacttggtaggccgaggcaggtggattgtttgagctcaggagtttgagaccagcctgggcaacatggtgaaacctccctgtctctgtcaaaaatacaaaaaaaattagctaggcatggtccttagctaattagcacgtctgtggtcccagctactcaggaggctaaggtgggaagattgcttgcgcctgggacgtggaggctgcagtagccaagatcatgctaccatgtactccagcctgggtaatggagtaagactccctaaaaataaataaataaataaagtggtattaacttagatatagataaattaatatatataatatataataaataataagcccagaacataaccatttttatctggaaatgttgtttatgataaagtgacattttacatcacagagaacagatcactcaataaattaggatgaaacaggtgactttttggaatacataaaataaagttagatctctgtttctataactctgcatcagttaggcttctttatattgcaagcaattgatgatccagcccaaactgccttactcaacaaagggcccatttaactgaaagaccctgaaatagagcaattccaaatttaggatttgctttgagttggtggctcagtactgacatgaaagacattggagtttttgtttattcacttgttttatgttttctttttctgcctcttcattctgacataggcagtgtcagctgcttcctaagacttcaatggctgccgaatttgccaagctccaaatcttacacaaaactgccccaaaggagaaaaatactatcttttggtagctcctttatataagaaggagaaacctcctcttccagaatgcttccacaacctcttcttgtcattggctcaaactgtcggcttgaccattccctagcaggcaatgatttagtttacgcctgaaacaacaactggcttatctgaataaatctttgtggaaagagggatggaagccgtgcctggtggctcacgcctgtaatcccagcactttgggaggctgaggcgggtggatcacttgaggttagaagttcaagaacagcctggccaacatggcaaaaccccgtctctactacaaagacaaaaatttgccgggcgtgatggtgcatgcctgtaatcccagctactccagcgctttgggaggccgagtgggagtatcgcttgagcccaggagttcaagtccagcatagccaacaaaatgggactgcgtctcttagaaaaatgaattaattaagccaggtgcagtggcacattcgtcctagctactcaggaggctgtggtgggagaatcacttaaacccaggagttcaaggctatggttgtgccactgcactccagcctgggcgacagaacagaccctgtctctaaaataaaataaaatttaaaaaggcattttgtttagcaagtaaaaaattgtgagccactatgcccagtcctaccttttttattttaaaattataaaacagccatgggcttcaaggagaccaaactccttcccattacatgagaagaaatcttaattagactatgtccaaatctaaataatttcattatctttgcaataattggttcagctatgggaatatgatgtcattctagccaataagatgagaagaaaggaaatagaagagaacacagcctgcaagggggctgacagtatcccaacacagcttggttttgtgtgtgtgtgtttttgttttttttgagacagggattggctctgttgcccaagcagaagtgccttggtgcaatctcggttcactgtaacctctacctcttgggctcaagccatcctcccacctcagcctccccagtagctgggattacaggcccgcaccatcatgctcagctaatttttgtactttttgtagagatggggtttcaccatgttggccaggctggtctccaactcctgagctcaaggtatcctcctgcctcagcctccagagtgctgggattacaggtgtgagccactgtgcccggcccaaacacagtcttaaagaatgtcaatgattattgctagcatgatcagatggttattccaactgcagctgttcttctaaatatgcactggggcaaaatgctacagcttcagtcactggtatacagctttggagctaggaagtgttttttctactttccaataagcaaagtacaccagaagcactttgctttcacgtgacaaaaactgacaatggttggagcagagcatcccagtggcaatgacttgagattgtcacttagttccttctggatccctggacttgctctggttcttatcctctctgagaccctattctatagtttttgcctcgattctatggctacatcatggccctctaataactttctttttttacttagagttcatttctgttacttgcaagaaccctactagctataccgacttatttttttaaaccacgtatttatttcactgagtttttgttttgcattcagttttataatatatttatcaattttatgtcttatgtgcttacttgattttgttacatgtcagcagttcttttctaccacaacttcctcattcttaaattcttaagttttgacgagtctctcaatgtaatagagctcatctttaagaaacttttcagacagaacacatagatggtctaattctgagatcttttataactgagaatgccattcttttgacatcacacatgacagcactcccaccctcagtttctatgggtattgctttattgttttatggtatttggtgttactcagaagcctgaggccaatctgatatttttccgctgaaagtaaccatttttccacgttcatatacttggaagttttctcatatgttttcttattatttctgcttcctttgttatttttacctttataagttctacacagttagtctggactcttgcagttgctaatgacagaaaatcaacttcaaattgatcagcattcaattgtgggcaaaagaattcattgaagccagtttaagcagagagatacttactaaagtgtattaacttgctgcagaatgattggaagacttgtagcaggaggctggactttcaggaactcctggagctacattgaaatctacctcagcaaagttgctgctaccactgccgctgcaccactactgacttaaagaccaggctgcctttaagccatggtcaagaaagttgccagagtaggaagttgctgttgtcactgctggttgcacagagctaggaactgacaagacatcagagcttctgacagctgctgcaaaagcaccaaaatgcctctgccactgtgctgctggaatagccacctcataggacccataaccctcttccaaatctcattcagatgcatctatgtgatggatgctacatcccatgcagaaatcctcactgcaaaggtctatgggtaatgtagacttccatcttccagcctctgatgtacacgaagtctcattagtatggggttggagcagtattgagtgaaccaattgatagtgtctgccacactcactagaataaaacaaatttgttcacccatgtccctgggaaggccaaggaatagagctgactctagaaacaaatggaagcaaaagttcaaaccatgacacaggcattctttctctcttcctatttttcagttctgattttattcatttaactaacatttattaagcaactactatgttccagacactgttctaagtgctgggatgccgcagtgaacaaaacatacataagtctttgcccccttggtcctgttttctgggagagctttgttttctggcagattatttgaaaatggcagcaaaactagttcccagtagctccaagcgtataggttacttagtgcttgaaatatcacaagaagaaaggtttttcctcccccaaagccctataaattccacacaataaaaagattctaattggttttattatatgatgtatccaagaccaatcaggtattgaggggcatgtaccatatgtccactggatgtggagagactgttcccaaacacaaaaggtgctgaaaccacaaagatagagttgatgtccgtttcattcctaaactattcaggatcctacacacacacacacacacacacacacacacattttcatatactttaaaaagtgcccccccatgacaatgcaaatttttcttccacaaatgaaaacacactctctttctccccaaaagaagaaacctcaaaactcatctagtcaccatattgtgctctaaagtcccagaattttaggtctagatatgactcttcatttaataaccaatggataaattaaaaatataggctgggcacagtggcgagtacctgtagtcccagctactcaggaggctgaggtgggaaaactgcttgaagccaagagtttgaggttgcagcacgctatgattgcatctgtgaatagccactgtgctctggcctgaatactcagttttgcaatatatgaggtgaatcagaagaccacaacaaaacctcttatttgaaaactgagagccaatttccagtggccaccattctatagcatatacctgtgctgctaaaagaaaaagtaaggagtctgccctagcagtagggtgaatcttgcactgtcaactccatgagctagtaaccaaagccaaagatctgccaggtcctgaattttgaacccgaacccacagcccaatggctttttctctttgccacagaccttgatgctgtgcccatacgcctcgctcttggtttaactgtattgttcctggctgtgtcccaacaccccaagatccagtagtctttctcagaccacatcccagtggttgtctttagtagcagaattactgtcacctttgtagtgctgagaagtaacagcaggaggtgtctggaggaggcctgggggtcaagcttctaccacagccaggatctttttccctctttttttaaaaaaaaggtttttttttgtttgtttgtttttacttttaaaaatatttcttcctaattatgtgcttacttaaccccagccagttttatcttctgcaattcccacctgcctaccttacctctcactaactttagctccaggttcaagtagggaatagagtccttagacttctccaaatgcacatgatcagctgcttcttagttatcctacaggtatctcagatatcttgctggttacagacagaaagggcctctccacagagctatatgtcattccccttcagcatgctgtttattcagcatgctgtttaggttaaagccttcttgtttaaaaaaacagttgtatagagatataatttccatgccgcacaattcactcatttaaagtgtaaagttcaatgactttttaatatcttcacatagttgtgcatccctcaccataatccattttagaacatttttatcactccaaagaaacctagcactcacctctcaattccctcatccctcccagtccctggcaactactaatctactttttttttcttttttttttttgagacagagtttcgctcttgttgcccaggctggagtacaatggtgacttctcagtgctccctgcaacctccgctttctgggttcaagtgattctcccacctgagcctctcaagttgctgggattacaggtatgcgccaccatgcctggctaattttgtatttttagtagagatggggcttctccgtgttggtaaggctggtctcgaactcctgacctcaggtgatccgcctgcctcggcctttcaaagtgctgggattacaggtgtgagccacacatctactttccgtctctacagatttacctattctggacatttcatatgaatggaatcatataaaatgtggtgctttgtgactggcttctttcatttagcataacattgtcaaggttcatccttgtggtagcatatatcagaacttctccttttattgctggataatattcctttgtgtggatgtactacattttcctcaaccattcattagttggtggacatttggttgtttcttactcttggctattatgataatattgctgtaaacattcatgtacaagctttgatgtggacatgtgtttgcatttcttgtggaatacctaggagtggaattgctgagccatatgccaatagcatgtttaactgcttgatgaaggctgtaattttcttgaaattattaaaagcagccaggcacagtggttcaagcctgtaatcctagcactttgggaggccgagacaggcagatcacgaggtcaggagttcgagaccatcctggctaacacggtgaaaccccgtctctactaaaaatacaaaaaattagctgggcgtggtggctggcacctgtagtcccagctactcaggaggctgaggcaggagaatggcgtgaacccaagaggcggagcttgcagtgagccgagatcacgccactgcactacagcctgggtgacagagtgagactccatctcaaaaaaaaaaaaaaaaaagaaattcttaaaagcataaaaaatcatcaacttattccaatatctgtatattttctacaagtcactaaagcactagctatagaaggcacatgatcagatttctcaaatataacatgtgtggttaccctataatccaagtgttcagttcttagatggggacagaagaatccttattcccacttacatacctcaactcacccagttcttcatgttagggcctaagacttgctgcactccacttctagttaccaatatttatcttatgattgcaagtaaaccaaacagttaggtctcacataactgagaagtttgggagacctgacttcagatatagatggatgcaagggttcaaactgaatagagacagatgccagctttctacttttcagcaatcctttttctgctttggcttaattctcaggtgagcttgctctgcttgacaacaaaagtgctcttagaagctcataatttcagataccaaaagagatccgtatcaatctcttcataaattgctaactggccctccttggaggtgggggtggggattatttttactccttgttcaatttccaggtccaaaggaatagggtggtcagcctgggttacaggcccattcctgtggcaggaatcagggggtcaaatgattgctatacacactaggtatggcatgagaggttactgaaaggaaaatatgcctgcaaaacagaaaagaaacaactgttcaacactttctgtatctattattcaatctcataattttcatttttatctctttatcacttttatgggtttcctatgaaatgtttctcaaatttgccctatacatcatttattcggttttctgcaaggtgaagtctataattcaccttccgcactttggtttctgtgtagatttaaaaaaatgatttacgtatttattatttatttaattaatttttttagagatggagtctatgttgctcaggctgtagtgcaatggctattcacagggacaatcatagcacactacagctttgaactcctggactcaagcaatcctccctcctcagcttcctaagtagctgggactacagtcaacatgccactacacttgtatttaaatgtttactgtgagtctcctctgctctgggtattgggctgggacaaggaccctgtcttcagagagattactgtctaatggaggaggaagccaagaagcagaaaattacaataagatgatatgattaaggtaagctcatggggcttacaagcgcacagcacagacatccaacccagcttgggggtagtcagaggtttcctaaaggaggtgacatctttcaagaatgagtattgattacacagggaatgagggccaaagaaggaagggaatttcgggtgttggagcagtatgtacgaaggcatgaagatgtaaaagggcctgtcatgaaagaggaacaccagtgatttcagtgtgactgcgacgtgcagtgcgtggtgggcagcaagaatgaggctggtgaggagcacaggggccgggtcatcaaccacacctgtgtgcctgggggttcagagtttaacctggggcagtggaagggtttaaacaggagagtgtcatgatcagagccgcattttagaaaggcagctccagggcccttcagaatcaagaagattgtccaagagattactgcagccacaatggtgagagagggtgaggaactcaattatgaaagtgtggcaggtgtgtaaccttcacatgcccagctccttcttgtgattaagtcagaagctcacctggcatctcctaggagattttctctgctctcctagaaagtgatcttcatatagctaaaacctcctcacctttaagcatctgagctcaatgctcacattgagatgtcacatctcaaagaggccttcaccattctagggaagcaacacccccaaccatcagcactgacttaagtataatttccatgaggacagggagtcatctatcttactgttctctgtactccagagcccaaacagagtaggagcttaagagcatgtgtttagtgggtgaatgtcgaatgaactgaagccattctcatcttcaggcaatgtgcggaagttcctcgagcccacgctagtatagagaaaggctcttgtggcaaggtcatggttgaaaagacagaggttgcagagtcagaggggccttcagatatgaccattctctgagcatcttatcttgccttctgtgttactacagctctactggcctgaagtgtgttccttaatgtaatcaacaattagctctaaggagtatgaaactgcatttttgtcaaaaactatcttcctcaactacacggaaaaatccatttttagagtgaagaaacatgaggttaaaaaaagaagaagagaaggagaagacagagaaggatgaggaaaggagggtgaggaggaatagaaaaaggaggggtagggcatggtggcttatgcctataatcccaacactgtggaaggtagaggcaggagaatcgcttgaggccaggagtttgagaccagcctagtccacatatcaggcttttaaattttttttgaagataccttgtctttacaaaaacatttttttaaacagtcaggcatggtggtgcaaacctgtagttctagctacttagctagaggctaaggtgtgaggatctcttgagcccagaggttcgaggctgtagtgagctatgattgtatcactgtactccagccttggaaacagagtgaaatctgctcttaaataataaataaataaatgaaaaagaaaaagaaagaagaaggcagagccaagagacagaaagacaagagaatgatgtatagcattcagctacatctcttagactttgcaattctatgaactaacaagttgcctttggagctaagctaattttctttttttttttttgtaacagagttttgctcttgttgcccaggttggagtgcaatggcgtgatcttggctcactgcaacctccgcctcccaggttcaagcaattctgtctcagcctcccgagcagctgggattacaggtgcccacaccatgcctggctaatttttgcatttttagtagaggtggggtttcaccatgttgtccaggctggtctcaaactcctgacctcaggtgatccactcaccctggcctaccaaagtgctgggattacaggggtgagccactgtgcccagcctggagctaagctaatttacactggctttggggactttcaagtaaaaacaccctgacccagttaataataaatcaaataatcaatctatccctatacctatctactaatatgttcttcaaggacatagttgacaattcactcttctgatttaatttcctttatcttttctactctcatcttttccttgagatttaaaaaaaagccagagggtggaaaaaactttgcaggggcaattctcacagtttatttttgtgtttctctcaaatctccttacatgtttatgtaagatactactgtgggtctcatgttatccacagaatcttaaaagggattattagcatagctgtggctttctccctttaaaataaaccccatgttacttggaatttgtattcctcaagggaccattttttccagatacacatcatactaaatactttaatcaaatgtgtaatcaaaaatattttccattttacttcttttattcatttaatggatttatgttacccattctttttggaagataattaacttggaataaaggctcagcttttatattccaaaatatgaaaaaaaatttcttctttctgggacatataaaatgtcaatctaattgtgcattgtttggtatagtcatgtgtagttctaaggaatatgaaattatatatatattaatattaaattaatttttcctagggtatcactctcacgcttaaaagaatttggtatagggtatgacttgagcaggttgtatagatctttttagggctctcacattatttcaattatcactaattgaaatacctaattatttcattacctaatattgtcagataggtcccacatatctgtatctttgagtcccatggcaccaagctcaggagtggttcctgccttcaacacagttcagaaaaggtcttggattgaggcagaagttggttcagtaccagggagtgagctctgttcttactgctggtctctggtctgtctgcctaagccttggtctgtgttttcttctattgctgttttccttcccctgctttgcacacctcctcgttcttactttccctctgggtctagtttcccactggctctattttatggctggtcctgacttctctgctaatgcacattctggcttctattgctccatgggttgctgacccctgactgctttttaatccatccaggtcttgcatctagccacactcatttgtgctccacaatgctagtgctgattcatcacatctgtcaacacttagagataatgaagtggggaagctcagacagaatcaggaaccaaaagaaagatacaaactactgaaactgactccagaagaaatagaaagtctgaatagaactatatgtcagaaagatgaattaggaattagtaatgaataattagtttgtaattttttataatgctcataaagaaagacccaggcccacatgttatccccactgaattctaccaaacattccatgaggaataccaatttttcacaaactcttccaaaaatagaagaggcaggaacacttcccaaatcattctgtgagatcaatattacctagatatcaaaatcacaccaacataccacaagaaaactatagaccaatatctcttatgaatatgaatgtaactaggcaagaaaaagaaataaaagacattgagattggaaaggaagaagtaaaactatatttatttatttatttatttatttttgagatggaggcttgttctgtcacccaggctggagtgcaatggcatgatctcggctcactgcaacctctgcctcccgggttcaagtgatcctcctgcctcagcctcctaagtagctgggattacaggtgcccaccacaatgtccagctaatttttatatttttaatagagatggggtttcaccatgttggccaggctgatctcgaactcctgacctcaagtgatctgcccaactctgcctcccaaaatgccgagattacaggcatgagccaccatgccgggcctaaaactatttttaaagatgatgtaatctcgtatatagaaaatccttagaaatccactaaaaaattacagttaacaaatgaattcagcaatgctgcaggatacaagattaatatacaaaaattaattgtatttttatatacttgcaatgatcatttaaaaataaaattataaaaaactcatttacaataaatttaacaaaaaaagcacaaaacttatactctgaaaactaaaaacgttctgtaaagaaattaaagaagatctaaataaatgaataaaatgtcccatgttcatggatcaaaagacttaacattgttaacatgttactactctccaaaactgggcacggtggctcacacctgtaatcctagcaatttaggaggccaaggtgggcagatcactttgaggtcaagagtttgagactagcctggcaaatatggcgaaaccccgtctctactaaaaatacaaaaattagccaggcgtggtggtgtgcacctgtaatcccagctgctggggaggctgaggcacaagaatcacttggacctggtaggcggagattgcagtgagctgagattacgccactgcattccagcctgggtgacagagtgagacgctgtctcaaaacaacaacaacaacaacaacaacaaaatgttaatactctccaaactgatctatagattcaatgcaattccaatatcatctcacctgacagctttgaacaaatctacaagctgattcttaaattcatatagagttcaagggatccagagtagccaaaacaattttgaaaaagaagaataaagtaggaagactcatacttcccaatttcaaaacttactacaaagcaacagtaatcaagacagtgtggtgcaggcacaaggacagacatatggatcagagagtctagaaataaatttatatatctatggccaatcaactgatttttgacaaaagaaccaagatcattcaatggggaaagaatgtcttttcaataaatggtgctgagacactggatagccacatgcaaaagaatgaagctggacccttacctcccactatttttaaaaattaactcaaaattggttagtgacataatagaagagcaaaaactataaactattagaggaaaatataggggtatattttcatgaccttggattcagccatagcttcttagatatgataacaaaagcaagagcaacacaagaaaaaatagatatattagacattgtcaacattaagaacttttgtgttgaggggcttgtatctagactatataaaggaggctttcaggctgggcacagtgactcacatctctcacatctgtaatctcaccactttgggaggttgaggtgggaggattatttgagatcaggagtctgagacaagcttggccaaaatgatgaaaccccatctctattgaaaatacaaaaattaggccgggcatggtggttcacgcctgtaatcccagcactttgggaggccgaggtgggtggatcacctgaggtcaggagttcgagaccagcctggccaacgtggcaaaactccgtctctactaaaagtacaaaaattagctgggcattgtggcaggtgcctctaatcccagctactcaagaggctgagggaggagaagtttgaacccaggaggcggaggttgcagtgggccgagatcacaccactgcactccaacttgggcgaaaagagagagactccatctcaaaaaaaaaaaaaaaaaaaaaaggccatgcagtaatggcaggtgcctgtaatcccacagctactcaggaggctgaggtctcaacctgggaggtggaggttgctgtgagctgagatcatgtcattgcactccagcctgggtgacagagtgagtgagactccatctcaaaaaaaaaaaaaaagagttctttcaacttaataataaaaagccaaataacacaattttaaaatgagcaaatgtctgaatagatgtttaccaagaaagagatacaaataaatggccaataagcacatgaaaaaatggttgacatcattagtcatcaaggagacgcaaactgaagccacagtgagataccatttcacacagtaggatggctagaataaaaaagtcaaatagcaattaagtgttagcgaagacgtggaaaaattagaactctcacacactactagtgggaatgtaaaatggcacaaccactttggaagacagtctgggtgctcctcaaactattaaacataagattaccataagacccagtgatttcactattaggtatatgcccaagagaaataaaaacatctgtccacacagacacttgtattcaaatgtttgtagcagcattattataagagccaaaaggtggaaacaacccaatgtccatcaactaatgaacagataaatgaaatgtggtacatctatgtaattaaatgttactgggccataaaacagaacaaagtactgatatactgccataacatagatgaaccttgaaaacattacagtaagggaaaggaaccagtcacaaaagactacataccataggattccatttatataaaagtccggaatagagaaatctataaagaaaaaacctggattaatagttgcttagggcaggggaggacagggggaagacagtgagagagcagatagctaaagaatagggggtttcttctcgagatgatgaacatgttctaaaattgactatggtaatgcacatatttgtgaacgtactaaaggccaccgaatcacacactttaaagggtgaattttatggtatgtgaattatatctcaataaagctgttaaaaacaaacaaacaataaccaaatccacccaagggttgtatttgatgacttttcagaacattaaaaagctttgaacatctagtgcagattcctgaaagtttagcttcatggatctgtttattttgcaattaatgaaggttaaaggagcattctccagcctctcgaaaactgttacttgggagcttagaatttctagttatgaatctatgcacaagaacagcacctgtcatgtctttcaaaggaaaatgtatttgccttattaacaaatcaagagtactaagtttctatcaaaagagcagaataaaaaaaagattaaatggcttatttgctcattgtttagagaagtatgctagtgaataataggtttaaacttctgtaagagttactagcatttcaagttcttaaaaaaggaataatgcattaaagtccatttaaaacttctaaaagtgacatcaatgaccataaaatagaagctgaatgagtatttcaagttaaaattatttactagaccaactactggctataagcaattaaactaaatacagaattattgagatggggataagaagaaaataaaaatgtaaatcattttattacaggattaaaaaaagctgatgaaagagctgtaacaatattttgataggaggagaataacagaatcagttagaagcaaaactggagaaaggagaaaaggaaaagaaaagcctgtgtgaaatatttaactgggtgttgaaaaatatgataattttgataggctcactttttaaaactaattttctcacatgtttaccaatggctggatgtgcaaatggacaacaattttttatcttgtaataaaatgaattttaaaaatataaggtagggccaggcacagtggctcatgcctgtaatcccagtccttgggaggccgaggtgagcagatcacttgagatcaggagttcgagaccagcctggccaacatgacgaaacccagtgtctactaaaaatacaaaaattagccggatgtggtggcatgcacctatagtcccagctacagtatatacatacatacgtatatatatatatatatatatatatatatatatagagagagagagagagagagagagagagagagagagacagagagagagtatatagtatatatacataactcctgacctcgtgatccacctaccttggcctcccaaagtgctaggattacaggcgtgagtcaccacatccatccggtaatttttttttaaactctctcttgtacctgtatcttatgtttaaccgaaaaaggttgaaaattgagttgctagacttaatcattattttccctggctgaagggatagtgggaggggtcaagcctctaaaagggagatatctgggccaggcgccgtgactcacacctgtaatcccagcactttgggaggccaaggcgggtggatcaaaaggtcaagcgatcaagaccatcctggccaacatggtgaaatcctgtctctactaaaaatacaaaaattagctgggcgtggtggtgcatgcctgtagtcccagctacttgggaggctgaggcaggagaattgcttgaacccaggaagcggaggttgcagtgagccgagataatgccactgcactccagcctggtgacagagcaagacagcaagactccatctaaaaaaaaaaaaaaaaaaagcaatctctgcacactggcagcaatgtgaataaataaaaggactaaggattactgaatatttgtcagttaaagaaaagccaactcagtgtctataagaataaatcattcttgactattctttcagaaggaaagcaaatttacagagaaaggggagaaataatgaatttatttgatttttggaaaaatctttgaaaaattttcacaccaatagctattccttagttgagttagcctagggtttcactatgagaaaagaattaacatcaaggtagtagggcagagacattattaaatggagaagtgtaaattgtggtatttcctgaggaagcaattctgggtcagtccaatttaatggtttattatgttttggaaaagacagtaaaatctctacatttgaaaatgatactacatttttatggggagtgagatgtcaaaatgacaaggataaactaggcaaagcgaaaacagcagacaattttggcctatatataagttaacaagcacattagtgggaaaatcatccaagctctagttatacatggatttgattgctgagtcacaatggggcacaggaatctaggcgtcactgaggctgctttttaaagataccccaatgatctgttgacatttaaaaaatcagcacaaggttattggaaacaaggcaactgacattgttgattttcctatccatgaacaacatagctcttatgactcctctcagcacatttggctccgagacccagaagcatgaatagaaggagctggccatccagggcatgcttttctaccctgtgcaatcatatcacacagcatgaccatgcttatgtataaggacagaatgtgtgttggccacatcactggtaagaacccagacagcatttcttgggctctgatagtcaccagaaaatggaaggacgtttattgagaagttacaacgtgaaaggcactctgctgggtttaggaaggatatgtagataaattagacagtgtgcttacctacttgagctccaagcctactcagagaaataaaactattgcaatatggaggagttggtaattatgctgagaggtgtggttgtgggtgttcagaggaaagcgaaaccaaattctgtcatttattcatgttagttcaactaacatgtattgagtaccactattcattcatgtattaatcaatatttatttactactatgtgcgagccacttttctaggtgctgggatgtagcggtgaaaaagacaaggtccctgttctcatgaagttaagacagattatttttaaaggatcaaaatagatgtgataacatgaaatagataagtgctatgaagaaaacaaaacaaatggatgtgatggagtggctggaggttggtggttcctttatatggaatcagaacaagtctcccagagaggtgacgtctgatacctgttgattagaaggagcctgctgtgggaagacgcccaagaagagctttctaggcagagggaacagcaagtgtgaaggccctaaggtgggaaggagcttggtgtgcttgaaaatcagaagaaagaccagttatagctcagcaagcctggagaagccagacagacaaggctggaagaagaccttgttcttccttttgtggatccctcaaccctcatagcccaacagaaaaaaagaacatgtcagtaagtacatgataacgcgcagattgcacagatttacaaaggagatcaattttttttaaatgtgaaacaggagtgaaagatcataggttatgaattatattttcagaaagaactaggagcataatgctgaggaagagggactatggacactatggaccagcatacgacaaacacacaaaaatctggacacggggtggatgcggtggctcatgcctgtcatcccaacactttaggaggccgaggtgggcagacaccttgagtccaggagttcgagaacagcttgagcaacatggtgaaaccccatccctacaataaaataaaataaaaaattagccaggtgtggtggtgcatgcttgtagtcctggctactggggaggctgagttgggaggattgcttgaacccaggaggtggaggttgcagtgagccaagatcacaccactacactccagcctgggggacagagcaagactctatcccaaaagaaaaagaaaaaatctggacactaggctaagaataagctgtaccgtgggagcagaagcagctgcagaagtgggcaaagagggtactgtccagggctgggacaggggctgcaaggctaagctccttacactacagggtttgaatgatccctaaaaggtcaatcaaatccatcttcttttccaccagaaacctctcaggactcactctggggaggtgaaacactttacatgtcattaacatgtcacgtcttgcaatgtattcttagggctttgtttctttggattttttttttttttttttttttttttttacagagtctctgtcgcccaggctggggtgcagtggtgctatctcggctcactgcaatctccgcctcccaggttcaagcaattctcctgcctcaggctcctgagtagctgggactacaggcgcacgccaccatgcccggctaattttttgtattttagtagagacggggtttcacagtgttgcccaggctggtctcgaactcctgagcttgggcaatccgcccaccttggtctcccaaagtgctgggattacaggcgtgagccaccatgccaggacccatttatttggatatttagtcttcaagaggtctctgttacgagagaatggcagcaccttggtatgaactttaaatgcaattatagtccctccatctttataacaaggcaagagatagtaatgaggcacttgcagcttttgaatcagaacagagtaaagagattgctttaaggaggcagcattcacagccttgtgaaccaggtacactgttcatggacttgcctcattgtggaacctagagaaaatttattatttgaagtcccagtttcctcatctgaaagaatgtcagcctgagagatttgttacagagatttaattggataatttaaatgaaagtgcctgccagattcagtaaatgtgcaggggtcttttttcccactcaaacctgtggccccaattcacccaaatccttgaggcccactctgggtggggaatagggagtccacagaccctaaggagaaagggcagaaagaagatgagatcattaggagaagctggtactacttacgaggcattgaattgaggaaagatgtgtgaaaaatgaaatttatcttcattccaaaaaggattctgagaagagaaactctggaacttctggagtaatgcattttctcccttcttaatgcaggaagctaacacagacattggtttcaagggtgttaaaatataatagggctaaaatcatttattgccaagattttgataacaaaatccaaacataagaactagcaaccccacttgcaagaatttaaaccaagttaagctcaaatcaatgcacagtatatccaacacgggaaaacattttttacactgcctgacctgggattccagcaaacaatcttcagctatgtaaattcataggcccttttaataccatgttagtctaggttcacatcaattgtttcttgccaggaaaatgggtttttcatttggagatggctcaatgccagaccgaacaggactttttagagacattggaactctcaaatatcaccagtcacagtcaatgcaatttcaagctcatgcgattttagttcatgcaatcatttgaagaactgagaaggcagaaaggagggcgctggtatcagagggattgcaaaatctattgaaatggcatctactgaagaaggagtcaggtgacctatgtgaggctcttagttctattaataaaccaaggtaggacttaattggatgaagtgacagatgtctagtatttttcattcttaaggtacacacaacaggttcaaaccagcctagtagagattcaggcattcacttggtggattggccaatttagtctgaggcaaggaggcactcccaaacataccagactccttggaaatatgttaagtggtactgatgatggccagggctgccaaggatgtcaaatgtatttaaaagtgagtggagcccaagcctgctgccctctgggtggagacatggtcgatttcaggaggatatggttccttttttatggtgtgagcaggaggtccccagccaaggatcttacctgacacagacaacatcaagataatatgaagtatgatagagatgcagctcttgtctttgtgaaaatagtgagactggtgttatcattgataagagcagcatttgcctttttgttttattttctttgtttaattttcttttaggaagggcagtacaacattgagctgaaggcagactatcagctagattccctggatttcaacactggctctcccactggctaaatgaatgatattaggcaagtcacttaaccttcatgtacctcagtttccccatatataatagagataacagtagcatctacctcaaagatttactttgaggaattcataaacacacacatgctcacacacacacacaccacacaaactgtttagagcacgcctagcatgtggtaattaataaagttggttattatatttctgtgtggttgattaaaaaataatacatatttgctataaaacaaccagtatacaaaaaaattttaaatgaaaacaacccattaccatccatattctcactatccacaggcaatggcaacattttgggaaagaagtacaaggtagaaacaaccatttaactatgtaatatttattctttccttcttccttattaaccacaccttgattttgttgtgggtagcaaactatattttccagccttccttgcaaataagatcaggcatgtgactaatttatggcaaatggaagttgttgggtggggcttctaggaaagctccttaaaaaaagtctgaatcaggacgggcgcggtggctcacgcctgtaatcccagcactttgggaggccgaggcaggcagatcacgaggtcaggagatggagaccatcctggctaacacagtgaaaccccgtctctactaaaaatacaaaaaaaaattagccgggtgtggtggcgggtgcctgtagtcccagctactccggaggctgaggcaggagaatggcatgaatcgggaggcggagcttgcagtgagcctagattgcaccactgcactccagcctgggcgacagagcgagactccttctcaaaaaaaaaaaaaaaaaaaaaaaaaaagtctcaatcagctggattttattccattttgtcatcaatcttcctccttcctactgtctaaaacatgggagtgatggctgaagtttcagcaatcaacttgtaaacctgagtataaaaagcacaccatggggatggtggaatacaaaacaagaacgactaagtctctaaggacattatagaacagctgtatgcaccaggaactgcttgctatcttctggatctttcatttggtgagagaaaatctcttcttgttgaagccactagctattggtaatgtctgttttcatataactaaactagattcctgagtacttccattgtctctaccttgtattaaatcctctgtttcccaaaccacatggtttcctttttcttggttgattcccctgtgttggtgtagcatatcccaggtaacttcatgagaaatgtacatcacaggcaaactttttgagatttaagagtttaggtaaaatacttgtttatctgctacatcaaaggtcagaataacagtagcttaaataagatagaagtttgtatctgtcacataacactctgaacataagggcccaaggctaatacggtaaactctggcctattctattactactttcatcttcaacaagcagctttttgtggtccatattggctgcttccactccttctattacagctacatttcagtcagaaagaaagaagaggtagaaaaagcaatctcctttctctttaggacatgggccagaacttgcacatatcacttcagctctcatcccactttacagaacccagccacatggtcacacctagatgacaggaaggatcagaaatacagtcttttgcagggcaaccaatagaagccatacagcatttattactgtagaagaagaggccaggcgtggtggctcacacctgtaatcccagtgctttagaaagccaaagtgggaggaccacttgagaccaggagttcaggaccagacagggcaacatagtaagacctgtctctacaaaaactttcttaacaattaggtgagtgtagcagacccagtttgaaaccaggttaattttgccagagcttgtgtttcttcccctatacctctcagcctcccaacataagcaatccaaaatggccatatagtttatgccatatagtttactacttttttttttaaagatagggtctcactctgttgcctaggctggagtgcaatggcatgatatcactgcagcctcaacctcctgggcttaagcaatcctcctgcctcagcctcccaagtagctagaactacaggtgttcaccaccacacccagctaatctttaaaaatatttttagagatggtgtctcactgtgttgcccaggctggtctttgtcctcccaccttattcccccaaagcactaggattataggcatgagacaccatgtccagcctagtttgctatttttaaagcacaggtcatttctcaggggtactctctaataaagttatacgacgtgcctttaaaatagcagtaggccaatgccattggctgtggagtatcattatggacatcaaagtccatctaagtctatattacgttgcaacacagtggagtatcaaagccccgttagtgccctgcagtggtcactgtgtgaaatagcccactaggttttctgcaaggcctgtcgcctgcccacagggcaacacatggggctgccccagactgtttcttcctcctggccacacagtcctgcagtctggagtgggcagaggctctgcaagcaacattcctgggatgcaggaccatgtgccccgttgctgtatgttgctgcctgcacactgtggctgctgctttcttccctatctacaccctacagtttttagaccatcatgctcagatctctcaggcatgttgctgatggagcagaaattccaaattttgttaagttctcaaagcacctcctgttgagagagtgtgtctagtttttgaattccacctatttggaatctgcaaactgagtgttcattttgcagggtcagtagtggccttacatcatcaacaataaacattcgctgaaagcctcttatgtctagggctgtgggcagctacctatgtagtgtaattggatctcctctagaatcaggctctcaccctgtgactgcttaatgtagtctaggaggttatgaagccctcaacccagctgaatagagacattaattgacccatgactaaccagcttttgataagatgcttccctgtggcaagatgtggggctgctaaatttcgttgagacataggtagtccaaggcacaagcactctggggtggtgaggcattgcagtaggaagaatacaaggtgagtaggaacgctggaaagagtttattgaatacgtaccgtgtgtcagatgttctctatacattagctgctgtaagtcaggctccccaggaaacagattctgaaatggaggtctgaatgtagaggttcattgggaagtgatctcagcaccagtgcctgagaggactgaagtaaacaggattgggcagaggaaaaagtggaagaatagcacagctgcaatagaggtttcaaccaatcctcctaccggtagctggtccttcagaggtgtcctaagtggaagggagtgggccttcttgccctttctacacacaattgataagtcatcagatgccagatgcccctggggaggggcagaattttggacttaataccttcagctgaaggcaacttctggaagaggctcagttgtgaactgttaacaggtaactctcttgacaggaggggagggaggggaagagtgccttgatcctgaaagggtgatctgggcagcacaccacgacatccactacattatattatttcatccacaggacatcctatgaagttgtcattataattaccattttaaaatggggaaactggcctggcgcagtggttcatgtctataatcctagcacgttgggaggctaggtgggtagattgcttgagcccaggagttggagaccagcctgggcaacatggtgaaaccctgcctctacaaaaaatacaaaaattagttgggcgtggtggcgcatgcctgtaatcccagccatggcaggctggggcaagaggatcacttgagcctgggaggcggaggttccagtgagccgagatcgcgcccctgcgttccagcctgggtgataggagtgaaaccctgtctcgaaaaaataatttttttaaaaggggaaactgaggcttgggatgtttatctaacttgtctaggctcacatagctgggttagattgactaaaacctccatatgctttctactacactaccctgcctcagaaaggaaaaaataaggcagggagggcatggaaaaaaaaaaagctggagacagcttcacccactgcacaattttgtcagaaatggatcagaagatgcagattacagagtggttatgagcacagtctctggagctaccctaactggtttgtatctcagcttcattgcttaccaaccttcggcaagaatttaacctctccatgccccagttttctcatttgtgaaatggagataataacagtacatgcctcacagggttattacaaagcttaaatgaaagaataaatgcagcacatgccagggcctaggacagtgccaggcctataataagcccctggtaaactttagctactattataacattcccatttatggtaactcttttgacagcacaggaaatactctctttaggggctctgctgagacttgcctaacatttcaaagaatgatgcctgtctctgagcaccacacacagcctcatcaccagtgaaggctctggatgttccatggatctgaataattttaaaaacccagcttttaggtggtcagggtgactcctgaaatacgaaagggaacaagtgccaaccacacctacacctccaatgtataatcctggaggcagaataaataaaagaaaactttaaaaaaacagctccttattgtctgccaaacaaaataccttttactgaagtcaactttttagaaatcttggacagtgcatgagtggaagctattcaattctcaaagaagtctcagttgagttttgtaatccaaatcccacagccgaaggagaaagatcattaaccttattgctgcaatttcaccaccacttcccctggatagcaacactcagggagttaaaccctcagtgcatgtttcttaggtgtgtggcccatttgttactgtgtatcccccagccccgctggagccactcagtgggttctgccacagctcagttctgccacagctcagttctgcctaccatgtagccatgtgataaaaggacttggaaatttaaatcaatcactcctttaaaaaataattcttaagaagaaaatcatttaaccaagcatagtgggttaaattgtggcctccaaaaagatgtatccatttggaacctgtgaatgtgaacttatttagaaaaagggacctagtgcagtggctcgtgcctgtaaatcccagcattttaggaggccgacgccggcggatggcttgagctcaggagttcgagaccagcctgggcagcatagtgagaccttgtctctactaaaaataaaaaataaaaaaaaatagccagctgtggtggcgcatgcctgtggtcccagctactcgagaggctgaggtgggaggatagcttgagcctgggaggtcaagcctgtagtgagctatgatcatgccattgcactccagcttgcatgacagcatgagaccttgactcaaaaaaaagaaagaaagaagaaagagagagagagagaaaaaggaaagaaggaaggaaggaaggaaggaaggaaggaaggaaggaaggaaggaaggaaggaaggaaggagagaaagagaaaatagaaaagaaaaggagtctttgttgatagataagaatctcacgctgggtctggtggctcttgcccgtagtcccagcactttaggaggctgaggctggtggatcactcgagcccaggagttcgaggccagcctggccaacatggtgaaacacaatctctaccaaaaatgcaaaatttagctggatgtgatggctcacacctgtaatctcagctattcagaaggctgaggcacgagaatcgcttgagcccgggaggcagaggttacagtgagccgaaattgtgccactgcactccatcctgggcaacagagtgagaccctgtctcaaaaaataaataaataaaataaaataataaagaatctctagatgtaatcatcctgaataatatgggcaggccttaaattcaatgataggtgtccttatagagaatggcagaaggagatttgagaaacacagaaaggaaggccatgtgaagacagaggtagagattaaagttatgcagccacagctaagggatgcctggagcccccgaaagctgggagaggcaagggaggattttcccctagagacttcaaagtgagcaccgtcctgccaaatcttttattttatttttttaaaatttgaatccatttatacagacttatcatacatttcagaaatactataagaaaacagaaataaatatcattgtctttgaagaagattttcttttttttttctttgctttgggataatatattttttcttttttttattattattattatactttaagttctagggtacatgtgcacaatgtgcaggtttgttacatatgtatacatgtgccatggtggtgtgctgcacccgttaactcgtcatttacattaggtatatcttctaatgctatccctcccctctcccccaaccccatgacaggccctagtgtgtgatgttccccaccctgtgtccaagtgttctcattgttcgattcccacctatgagtgagaacatgtggtgtttggttttctgtccttgtgaaagtttgctcagaatgatggtttctagcttcatctatgtctctacaaaggacatgaactcatccttttttatggctgcatagtattccatggtgtatgtgccacattttcttaatccagtctatcactgatggacatttgggttggttccaagtctttgctattgtgaatagtgccgctataaacatatgcgtgcatgtgtctttatagcagcatgatttataatcctttgggtatatacccagtaatgggatggctgggtcaaatggtatttctagttctacatccttcagaaatcgccacactgtcttccacaatggttgaactagtttacactcccaccaacagtgtaaaagtgttcctatttctccacatcctctccagcacctgttgtttcctgacttttcaatgattgccattctaactggtgtgagatggtatctcattgtggttttgatttgcatttctctaatggccagtgatcatgagcattttttatgtgtctgttggctgcataaatgtcttcttttgagaagtgtctgttcatatcctttgcccactttttgttggggttgtttgattttttcttatacatttgtttaagttctttgtagattctggatattagccctttgtcagatgggtagatttaaaaatttttctcccattctataggttgcctgttcactctgatggtagtttcttttgctgtgcagaagctctttagtttaattagatcccatttgtcaattttggctttcgttgccattgcttttgatgttttagtcacgaagtccttgcccatgcctatggcctgaatggtattgcctaggttttcctctagggtttttatggttttaggtctaacatttaagtctttaatccatcttgaattaatttttgtataaggtttaaggaaggggatccagtttcagctttctacatatggctagccagttttcccagcaccatttattaaatagggaatcctttccccatttcttgtttttgtcatgtttgtcaaagatcagatggttgtagatgtgtggtattatttccgagggctctattctgttccattggtccatatctctgttttggtaccagtaccatgctgttttgattactgtagccttgtagtatagtttgaggtcaggaagtgtgatgcctccagctttgttctttttgcttaggattgtcttggcaatgcgggctctttttggttccatatgaactttaaagtagttttttccaattctgtgaagaaagtcattggtagcttgatggggatggcgttgaatctataaatttccttgggcagtatggccattttctcgatattgattcttgctatccacaagcatggaatattcttccatttgtttgtgtcctcttttatttcattgagcagtggtttgtagttctccttgaagaggtccttcatgtcccttgtaagttggattcctaggtatttattctcattgaagcaattgtgaatgggagttcactcatgatttggctctctgtttgtctgttattggtgtataggaatgcttgtgatttttgcacattgattttgtatcctgagactttgctgacgttgcttatcagtttaaggagattttgggctgagatgatggagttttctaaatatacaatcatgtcatctgcaaacagggacaatttgacttcctcttttcctacttgaataccctttatttctttctcttgcctgattgccctggccagaacttccaacactgtgttgaataggagtggtgagagagggcatccctgtcttgtgccagttttcaaatggaatgcctccagtttttgcccattcagtatgatattggctgcgggtttgtcataaatagctcttattattttgagatacatcccatcaatacctagtttattgagagtttttagcatgaagggctgttgaattttttcaaaggccttttctgcatctattgagataatcatgtggtttttgtctttggttctgtttatatgatggattacgtttattgatttgcgtatgtttaaccagccttgcatcccaggggtgaagccaagttgatcgtggtggataagctttttgatgtgctgctggattcagtttgtcagtattttattgaggatttttgcattgatgttcatcagggatattggtataaaattctctttttttgttgtgtctctgccaggctttggtatcaggatgatgttggcctcataaaatgaattagggaggattcactcttgttctattgattggagtagtttcagaaggaatggtaccagctcctctttataccgctggtagaattctgttgtgactccatctggtcctggactttggttggtaggctattaattattgcctcaatttcagaacctgttatttgtctattcaaggattcaacttcttcccagtttagtcttgggagggtgtatgtgtcgaggaatttatccatttcttctagattttctagtttatttgtgtagaggtgtttatagtattctctgatggtagtttgtatttctgtgggattggtggtgatatcctctttaacattttttattgcgtctatctgattcttctctctttttttctttattagtcttgctagtggtctatctattttgttgatcttttcaaaaaaccagctcctggattcattgattttttgaagggatttttatgtctctgtctccttagttctgctctgatcttagttatttcttgccttctgctagcttttgaatatgtttgctcttgcttctctagttcttttatttgtgattttaaggtgtcgatttcagatctttcctgctttctcttgtgggtatttagtgctataaatttccctctacacactgctttaaatgtgtcccagagattctggtatgttgtgtctttgttcttgttggtttcaaagaacatctttatttctgccttcatttcattatgtacccagtagtcattcaggagcaggttgttcagtttccatgtagttgagcggttttgagtgagtttcttaatcctgagttctagtttgattgcactgtggtctgagagacagtgtgctataatttctgttcttttacatttgctgaggagtgctttacttccaactacgtggtcaattttggaataagtatgatgtggtgctgagaagaatgtgtattctgttgatttggggtggagagttctgtagatgtctattaggtccgcttggttcagagttgagttcaattcctggatatccttgtcaactttctgtcttgttgatctgtctaatgttgacagtggggtgttaaagtctcccattattattgtgtgggagtctaagtctctttgtaggtctctaaggacttgctttatgaatctgtgtgctcctgtattgggtgcatatgtatttaggatagttagctcttcttgttgaattgatccctttaccattatgtaatggccttctttgtctcttttaatctttgttggtttaaagtctgttttatcagagactaggattgcaacccctgctttttttttttgttttccatttgcttggtagatcttcctccatcactttattttgagcctatgtgggtctctgcatgtgagatgggtctcccaaatacagcacactgatgggtcttgactttttatccagtttgccagtctgtgtcttttaagtggagcatttagcccatttacatttaaggttaatattgttatgtgtgaatttgatcctgtcattatgatgttagctggttattttgcccattagttgatgcagtttcttcccagtatcaatggtctttacaatctggcttgtttttgcagtggctagtaccggtttttcctttccatgtttagtgcttccttcaggagctcttgtaaggcaggcctggtggtgacaaagtctctcagcatttgttggtctgtaaaggattttatttctccttcacttatgaagcttagttcagctggatatgaaattctgggttgaaaattctcttctttaagaatgttgaatattggcccccactctcttctggcttgcagagtttctgccaagacatccgctgttagtctgttgggcttccctttgtgggtaacctgacctttctctctggctgcccataacattttttcctttgtttcaactttgatgaatctgacaattatgtgtcttggagttgctcttctcaaggagtatctttgtggcattctctgtatttcctgaatttgaatgttctgccaactcctttatgtcagacttctggcctccaaaactatgaaagaataaactcctgttgttttaagccaccaagtttgtgacaatttgttacggcagccacaggaaactaatacaccaagattggccaactcaaatggatagtcttgtttcattgtttcctttataacccatgttttatatatctatatctatctatatataaacatatatatatatgtgctatccatcaaaatgtttataattttttttgtttttggagacaagttctccctctgtcacccaggctggagggtagtggtgagatcatagttcattgcaggcttgaactcctggtctcaagcaatcctctcacctcagcctccccagtagctgggactacaggtgcacaccatcacatcctgctactttttttttttttaaagatggggtctcactatgttgcccaggctggtctcaaactcctggccttaagcaatcccctcaccctagcctcccaaacagctgggattacaggcatgagccaccacaactggcccttgtttatgatttttaaatatattcagtaaattaaaaatacaagtcataaacagtatgatccaattttgattttgaaacaatacatgacaactatccattacccagtgagtgtttgcactacatatttttctgaataaataattagaaggctttaaacccatatagtatcaatggataggtcccagatcttattctcttgtccagatttgaggaagtcacttctgagattgagccagtcttcctcaattatgtggaaatattcagttgttttcccatcaatagacccagaccagagatcaaaaactcaaatatctatagtagccaggcagaaatattctttaaggatgttggtaccatagaagacattcaggtatcttaggtactgtggcaaactggaaagaacattcttgtcttgagttggagctccagctcatccccaactgcctgttgtcacagggaagtcaggctgaatgttaccaaatcttctgatttttaaagaggtactggaaatttcagtttttatatgaaaacttctgttttttaaacacaagcatctaattcacattctcttaaaacatttttcaggccaaataaaatccagaagctcagtcctttaagtttccacttgggatttagaccttcataaataaagaccatttcattcttcccagaggttaagaaatccaggtttcagaacacaatgcctaggcttctttgttggaagagacatggaaaaattcctctcattctttgctgatgagcctacaaccttgaacacaagacacagttaactctgtaatcaagttattctgccacgtgaaatttttcacaaattgtcctgctaagtaaacactgtgccaaatatatggtgtatctcaatgcatggtagatcattatcacaatgattagtatgagttttctcctcctcctttggatagtccaacagtagagataggggtaggataatgtggtacccaggaaatggtagaagagcctttatttctcaggccatcacagtagcagatgcttattgaccaagcctgcagggtctgttcaaaggcaaaggaccctattctctccattatgcttagtgccaagcagagtcataggaaacttccactgtggcactaaaggcagtggttcttggtgttcagtctggttccccaggaccactgctccccattcccatcaaatgtccaatcccttctggggtacaacatgggagcagctgttccacttagcccccttcagcctttggggtccctctacttcttggataatctagcacgtttaggaacctagggcttgagaggttggggaaggaaaagccttttaatgacaccagaaaacaaaagcaggctcacttgattgcttgaagtgggtcaaagaccaagagagaaaaattctacttattgttttcatgttttcttactgtaagaaacctaagagaaattaatctctcaatggatccagccaccacattatcatattcaggagaaatgtccctaaattccagacttttgagtctgccctagagtcagatctctgtctgccatttgagaagctaacaagccaagtagtgcccaggaatgtccataataaaccaaaggcataggcaagagaggcagagaggcatttgtgttgggaaggaccacaggaacactctcactacactgcggctccacaaagctttattctcctgcccaggtctagaggaaagtctcttgaggccaggatattatagatgacttctaggactggaacaatgacttgctcctagtagggctcaataaacttgttgcttaatcgtttctaagaagctgtgcgaaagtgagaaagcctcagtctctctgtttcagcttctccaaatgtgactaacagcagcaaccctgtctattgctgagaactgctgtgcagatgaaaacagacaaatatatgtagttttaaatgtaggcaatgtgcttgtaaatttgcattttgaaaagctagaaatgcccttgagtaaactgccaactccttgcagaaaagataaagaaaattttgttccgcccagaacaaaaagatcctggctattccattaaaacatagccttgcagtgttatctaagaatttgttacacactttgtaagctttgttagctagactgattagatagataactgtgattttgaactatgacatctattccaaaaggttttagaaacaacatgcattactatgtaactaaagattcaaagtaaacaggtcttttaaggtttatctaggctatgtaatgacaatacaaacgggcattttgataacaaagcagtattaggtcagcacttacaattcaatgtgagtctggaatttaaaataatgggcagtctgacatcctccatattgtctctgttctagctcaggagactatacagtctacttttcaaactccaaagcttaaggtgttagaacaaatgccttcaactgattgtttagacttttcactcctaggctcacttaaaaaaaattagcagtaatactatgttaataaattcagtcattccatgtgttttttttgtttgtttttttggttttttttgagatggagtttcgctcttgtcgcccaggctggagtgcaatggcatgatctcggctcaccacaacttccgcctcccgggttcaagcgattctcctgcctcagcctctcaagtagctgggattataggcatatgccactacacccggctaattttgtatttttagtagagacggggtttctccatgttggtcaggctggtctcgaactcccgacctcaggtgatctgcccacctcggcctcccaaagtgttgggattacaggcatgagccaccgtgcccagcccagtcattccatgttttgtgagggaaaaaaacttgaaaaaatattgaaataattattatgtagtactttaaaaatgttttccagacacttttaagacaataataaaataaaagaattatagagattgaggaaacctaaaagaaatagtcactggtctaattttacaaacaaagaaaccggccccagagttttgggtgaactgacctgctcaaactggtgttagcaaatcataaccaaatttgttgcaacaacagcaacaacaacaacaaaagaaaatcttttttttttttttttgagtcttgctctgtcacccaggctggagtgcagtggtgtgatctcagcttactgcaacctctgcctcccaggctcaagcaattctcgtgcctcagcctcctgagtaactgggattacaggtgtgagccactatgcccagctaatttttgtatttttggtaaagactgggtttccccatgttggccaggctggtctcgaactcctggcctcaagtgatccacccgcctctgcctcctgtcagatatgagttctaaatttctttacaaagaatcaatatgtcagtatgttcaattatttgccttctacttttaaacttaacttcctcataaagcaacctttttggattaactgctccaccctgactcatttcaatcacctgcaccaccctgactcattctgattacctactccacccagacaaattccgattaccagctctgtcataaccatttttcccgccaaaccactcaccccgtcactctctttaaattagccaatcggaattagtttagcctgtgcagtctaaccctagccaataggggaagaacacagcagcaggggccacgtgtgtcagggataagaacaccttcccctttcttgtccagtgtgcgctcaccattgctccatttgtaagggtgcacccttctctagaagtaacttgccttgctgagaattaaaaagaaaattttatattcgagtgctatttcttttgtagcaccaaaactttatttataacactcccaaagtgctgggattacaggggtgagctaccactcctggccaaaaaagtctattgatagagaattattttcttttttctttttttttttttttttttttgagatggagttttgctctttcgcccaggctggagtgcagtggtgcgatttctgctcactgcaacctcggcctcctgggttcaaggaattctcctacctcagcctcccgagtagctgggattacaggtgtgagccaccgcgcccggccataaattggtgtatttgtgtatgcacacttggataccaaaatccacggatattgaagtccctaatataaaatggcatagtattttcatataacccatgcacatcctcctgtatactttaaatcatctgtagattacttgtaacatctaatacagtgtaaatgctatgtaaatagttgttataccatattgtttggggaataatgagaagaaagcaaaaagtctgtacatgttgagtacagacaactttttttctgaatatttttgatctgaggttggttgaatccacagatgctgaacccacggatacggatggctgaccacggttgttactctttcacttcgaggcatcaggttttatcctttggatttagacaggactaggatatccatatcaattttaattccattacacttctgtcaattcaatttttttcagtaaactgttattaatacattttacatatacttttatcaaaactgggtgctgaggaaagaatacattcaagtcttggaaaatacctgccacaaaacctaaagagctaatcctctatgtcaatccaatcagccttatttcactttcatataaagcctgactttttcttttttttctcaaaaattaatcagtgtgcaataactttgtttttcaattcaaattaatgtattaattcatatctcaaaaacattgttaaaaacaactgagaaatatcttcagggaagtaccacataatattactaaaaaagattaaatcaataacatgataattaatatatcattttataacatgttattcaaacgtgctaagcaagataataaatcaatttgctgtttcaacaattttgaactcgaataagaaaatcacttgaatttgctttttgtctaacatcatttccatagtcaaaaataaatataaaataggctgggcacagtgggtcagcctgtaatcccagcactttgggaggccgaggtgggtggaacacctgtcaggagttcaagaccagcctggctaatgtggcaaaatgccgtctctactaaaaatacaaaagttagccaggtgtggtggtacatgcctgtaatgccagctactcgggaggctgaggcaggagaatcgcttgaacctaggaggtggtggttgcagtgagccaaaattgcaccactgccctctaccctcggtgacagagggagattccatctcaaaaataaataaaatacatataaaataaatgcaagtaataattcattagccaaaaaaagtaagaaatgtgcattaaaatgatctataacataaccacatttatttaagaatgtattccaatatcaaatggcaaatttcaacaaagcaaaaactttttcccaccaacgtgatactttgtaaaaatgtaatagaatgtgtgactaaacttttaggttatttgtgaagttagaggtatcataaaaggcatagtattcttctgaaaaatttagtttgatcaaactctggtgttcatttgttgagaaagaataagaaccaagaatacaaatcaaactccattaagaaaataaaaagacaagccacagactgggagaaaatatttgcatatctgataaaggatgggcaaaagacatgaaaagatctcacttcaccaaaaaagatatacagacggaaaataagcatacgaaaagaagttcaacatcatatgtcattagggaattacaaattaaaacaaaaaattagaaactactacacacctatttaaatagctaaaatggaaaacactgacaatacaaaatgctgatgaggatgtggagcaacagaaacttcagttcattgctggtaggaatgcaaatgatacagccagtgtgaaagtcggtttggcagtattttacaaaactaaacatactcttaattatgcagcaatggttttgctccttggtatcacccaaacttatgactaacccaaaacctgcatatgaatgtttagttaataaataacatatttatgccaataacatatagcatattattatttagttaataataaacatagcagcttcattctaatttctaaaacttgaacatgacaatgatttccttcaatatgtgaatggacaggctgtagtacatccatacaatggaatattattcagcactaacatgaaatgagttatcaagccacgaaaagacatagaggaaccttaaatgcatattactaagtgaaagaagccaaccccaaaaggctacatactatatgattccatctatatgacattctggaaaaggcaaaactatggagacagtaaaaggtcagttgttcctggagttgtgggggagagatggatgaacaggtggagcacaggagcatttcagagcagtaaaactcttctgtccgatactgttgtggtgggtatatgtcattagacatttgtccaaacccatagaatgtaccacacaaagaattaaccctaatgtaaactgtggactttagttaataataatgaatcaatattggctcatcaatcataacaaatgtaacatactaatgcaagatattaatcatcagggaaatgttgggagggggagaaacaagaagagatttgggaactctgtacttttcactcatttgttctgtaaacctaaaactgctctaaaaaacagtctgttaatttaaaaaatatcaaactctgtaattttgtttaaatatatgatcaaaatttccctatgaattaatgaaagaaaagtgtatgcattgctaaaaaaatccagaagctagcattttatttcttattaatcgaaagaaggaaatatgcaaaatttaataaataaaaatgagaattaggccaaagagggagaaggctagaagcttgaggccaggaggttgaggccatggtgagctaggattatgccactgcactccagcctgggtgatggagcaagaccctgtttctaaaaaaaaattgcttcattcaaaaaatatttttaaagatgagaattgaccatatttgaaataaatatttcatgatgatttgataatcaattctaactatattctttatgtaataatatacagcaagtccaaaataaataaaaaatttatccatgacttattcctgaaaaattgggtagtcatgaaaaacatttaaaatagtcagaatcattcacctattctgctttgggtgtttatagttgcttccctttcctttttaaaatttttttatttttaatttttgtgggtacgtagtagatgtatatgtttatgggttcctttctaatcaatgatacattttaggaataagtaattgaagaggtaaaaaataatcaatatttacatatacttaaatatattgacagtcactccttcataccaatatccttttttttttgtttttttttttttaggcagtcttgctctgttgcacaggctggagtgcaatggtgcagtctcaccttactgcaacccctgcctcccaggttcaagccattctcctgccctcagcctcccaagtagctggggttataggcacacgccacaatgcccagctagtttttgtatttttagtagagacggggtttcaccatgttggccaggctggtctcgaactcctgacctcaggtgatccacctgcctcggcctcccaaagtgccggaggcatgagccaccatgcctggcccaatatcctctttttttactcaccaggtgatgcattctttaacagctgccttatttagaggaaccactaggacagggccactcagattaaggaagaaagatgttaaacaacaattatcattactcctaccatcacactcaaccaaatatctcaataccaaaatggccatttctaatgctggttttactctcagaaataaggttttctaaatgagagtttctaagccttatctgggaaccacatcatcgtaggaaccttctctttggtgtcctaggagttctcatacccaaggccagcttgatttgggatggtgatgggtctttctttgtaaagtgagaaaaggcctatggtaagcacaagcacgttatcagcaagggttttgttttgttttgttttgttttttaagagaaaatattaaaagaaagttgaatgtctgacatggaatctctcaaaactatccaggcacgcttacgcaaaactaatttctctcctgttttccctctactgttctccttccacagctaagggggagaggggagtcctgaatctgattttttaaaaagtgcctccaggcaagtctgatgattaaccatccagtttggaaaccacccaacaatgtacattcattggggcttgatgaggtcactctccaccattcatcacattacttatggattaggctggcctgccagaaggaaaatacagcatattacaaaatttcatcgaaactatctaaatcactctcttgggctaaaatatctgcaaggaaatccaaacactcttctgtattactgaagtcctttgtttccaagtaacacatcaatttaacataaataaaaagaagaatttattttaaggacaataaacatctaaaggaacgcaacaccaaaactgctgcctggtctgaggagggactgcaaccaggcatttctttacctgtcttgcttgttttcttctccttgtgtgctccattcttttttcttgaagacagaggctgctccgttcctaaggcagatggtaatgccactgtccatgagttgtaacatttcctccactgaagagtctagctcagagagatctctccatcctttttccaaattcctgaagaagggacattgaatggcctatttggaataaaagattcactccttagttcagtcaactgaagccagaggggcagtcacatacaaatagggttgccggggatgacttcagcatgttgggaacagggaggggagagcaaaggaagcaattaagggagtcatcctgagaagagcaggagttctcccaaggtgtactactactacatcctgtaagctccggacagccaatgtggacaaggaaatcttccaaggtagcacttattagctactgtaaggaatgacgtcactgagcccttaccaccaagactattttgctgtaacttctagttttcagtaatgccattgataagttttgtgcccataggattctcattcctatatatgtgatctattttttcccctctctgaaagtcttcaggatatttctttatccgtgttgctctaaaacttcacgatgatattctaagatgtgagtctatttttatttattgctctgggcacttactcagggagccccctttttaatcttcattttaatttttttaaataaaaaatccccatttggaggtaatctcagactttttacaaaattgtaaatatggtataaagaattcccagattccccaaatgtaacttggtacataagcataatttatcaagactaaggaattaacaatacaatagcttatcctacagaccttatttaaattttgtcaactgtcctattaattttcttttcctggttcaggattgcagtggactgaatgcttatgtccccttaaaatcaatatgttgaaatgcgagcccccaagatgacagcattaggagctagggcttttgggaaataatcaggtcattatacgatttaataacacctctcctgtatagaatgtatcccagttgtaacttcagatttctccttgtgatttgattaatttgtctcccccattagaatataagtttcatgatgggagtaatcatgtcaggttgctttggtcaccattatattcccagtacctaaaatagtgtttagcacatattatgtcctcaatgaatatttattaaacaaatgaataaattcctttaaaacattttatgatgctgggaaccattgttaagagaattgtttttgcctaaaaactcaaagaacactgcaataccatcttccaggttccccgtgtggttgggcatggtgttgtaaaacagatgaaataaatctcaaacaaatgaactaccctgttaacaatgaggaatgtgttagccaaatcacctataactcattgtaactggccacattattatggagaatggccttagggacttgaacaaacttctcataacataccagagtctggtcttaccaggagtataaaatcaatgggtaattaactgaaccaagaccaggcctgcctccttgccccagcacagatgtgcactgatttcaagagggcacaatttatgtttcatggtgagtaaaggaggcttcagaccaaggacttgccaatgactagccatatggaagccaaactttaccctctcttttaaaagtgcaaagatggtgtcaaattcaacatttgtggcatttcttagagttttatgatttaggtttttgtttttgttttgttttgtgttttgttttgtttgagacggagtttcattcttgttgcccaggctggagtgcaatggcgcgatctcggctcacagcaacctccgcctcccaggttcaagcgattctcccgcttcagcctcccaagtagctgggattacaggcatgcgccaccaggccggctaattttttgtatttttagtggagacggggtttctccgtgttggtcaggctggtctcaaactcccaatctcaggtgatctgcccgcctcggcctcccaaagtgctgggattacaggcgtgagccaccgcagcaggctgatttcggtttttatttaatagaaaagcattgcatttatttgtaacagccaaaaattggaaacatttcaaatgtccttcagttgggtgaatggttagactgtggaacacctatatcatggaatacaactcagcagtaaaaaggaacacgttattgatatgcacaactcctccaatggatctcaagggaattatgctaagtgggaaaaaagccaatatcaaatacatattgtatgattccacttatataacattcttaaaatgaccagatgatagacatagagaacagattagtgatttccagaggttgggagtgagaagagggcgaaaggcatgactataaggtagcagtataatgaatctttatggtagaacagtcctgtatcttgattgtggtggtggttacccatgtctacactagataaaattgcacagaactatgtacacatacacacacacacacaactacatctaaaattggtgaaatctgaataagatctgtcaattgtaccaatgtcaacttcctaattctgatcctgtactagagttgggtaagattttggcattggtggaatctgggtgaagtatacacgaaacctccacatgacaggttgagcaatcctaatctgaaaacctgaaatctgaaatgctcaaaatctgaaatttattaaaacaaatgttcaatgcaatgtatttgcaagagcaaaacaatttaagcaatataaatgctcatcagtaagggatgagttaggccaattatttatatgcaatattaggataatatggaatgaaatgagggcatacccatgctaagctgttacaagtggttgccctgggagtaaagaaatacacattaactttttctttagatatttcaacatcgttatactacttttataatgtaaaaactaaaaatattgtgcccagaaaaagagagaaacagtcatttctcattatccataggagattggttccaggacaccctaaaatccacaaatgcttaagtccttatacataatggtggagtacttgcatataacctacacacatcctcctgaatacttaaaatcatcttttgggccaggcacggtggctcatgtctgtaattccagcactttgggaggcagaggtgggtggattacctgaggtcagcagtttgagaccagcctggccaacatggtgaaaccccatctctactaaaaatacaaaaattagctgggtatggtggtgcgcgcctgtaatcccagctacttgggagcctgaggcaggagaatcgcttgaaccaggaggcggagtttgcagtgagccaagatcataccattgcactccagcctgggcaacagagcgagactccacctcaaaaaaagaaaaaaagaaatcatcatttggttacttataatacctaatacaatgcaaatgtcacgtaatagttgttatggtgtcttttttagggaataatgaccaaaataagtctgtccgtgttcagtacagaaacaaccatccattttccccccgaatcaaaatctgaaattttctgagtgctgaaatgatgctcaaagaaaatactcattgaatcattttggagttcagattttttgattagggatgttcaactggtaagtataatgcaaatattccaaaatctgaaaaaatccgaaaaaatccaaaatccaaaacacttctggtcctaagcattttggataattaatactcaacctgtatttttgcaactttctgtgaatctataatggcttcaaaataaaaacttattttatgcaatataagttatttctagtaaaacaacattcagcatatatgtttgccttcatttacttctgaaatcccactaaatggagtaaagaaaagattataaacataaaagtatacaaccacacacccccaccccagtatgagaccatagaaatggagatgactgtaaaaatatagaaactggaaaatagatgtacatgagataactatttatagtaggtttctgtgaaaccgtagtagtagagatgaccccagagcaaggagcagtcagcagggatgactccattctggacaaggccactaagaagacctgttatgtaggcctggacaaagtaccacaaagccaagcagctatggagaacacatggctcgaggcattcgctggcctttctgtctctgaagcagttgcttagcaatgtgacaagatgccagacagttggagacccaagtaagtgttcacatgctggggggaagcagagggatggctgaatatggggctagtggtggatctaaagtctgaactattgggggccagacacagtggctgacacctgtaatcccagcattttgggaggctaaggtgagtgaatcacttgaggtcaggagatcgagaacagcctggccaacatggtgaaaccctatctctactaaaaatacaaaaattatctgagcatggtggtgcgtgtctgtagtcccagctactcaggaggctgaggcaggagaatcgcttgaacctgggaggcggaggatgcagtgagccgagattgcaccactgccctccagcctgggcgacagagtgagactctgtctcaaaaataaaaaattttaaaataaataaataaagtcagagctattgggaaaaatcaaatagcacaggggctgaggaagagtggtctcagtgcctccggtgtctgaggcttgctctgtggactagaagggagtagacaaacctgatttatagggccaaggttgggctggacacccccagtctaaatcaacagttttcaaactttgtaaagcagtggaacattttctccaaagtaaatcttaaataaaagtgtaaaccaccaaaacaaagtggggttgctctggtagcaactgcatccttgatttccaggcctcctgagggtcccacatccagatgttgaagcaaaaaggaattcaaaaatgcagtaattttctttattgagaagttaggttagaaacccaattttcaagtatgcaaattaactagaatgtctccagtctgtgttagatagaacctgaaaacggaaattttgaactagcacaccagtcaccatttccagtctgctctctcagcaggccccatggcccctgtaatttagctagttaaggcttttcctctggccaaacagctaaacttgagccaggtggacttaaacacatgaaccaattcagtttactgtctaaaaatgaaagagaaaagtctgccaggatcttctcctcgtccccacaaagttcccaagagcagaattcagccctcctcccctcccactacaaacacaggagagaggccagcccaatataacttaaaacagagcgaccctgcagccctctcagacaaattacatcaaaacaagtcaaagcaaatgcaactgtccttaccagttttgtaaaggaattgcctgggaaccattccttttcagacctaattaaaaagtcagttttgaattacagaacaagatggtatgagagccagtgttcaacaggcagaacaaacaaacatgcaaagataaaatgcatgggcttttacagagagctgctgccagcgacagcagaaatggctctctttcagccaagtctagggtgccctggaaaacttcatacctctccagggagacagttcccagaaacctccctcccctgcaaagcactcctataacaaataaataaactacatttcccaaagttctctttgctcaggcctggggctatattttaaaccactctgtaattgtcccccaccagaaaagcagaaatgtttaaatgtgacaaccttttgacatacagagttgactcagctcatttcaaatttcatcttatctccagtgtccttgggcatgttttaaaagataaaaataccaaatgtgaccaagatcgtcaaggtataatggaacaagggtccaatgtttttttaccctcaacgaatgcattatacttcatttagatcagcggtctcaaatattagcatgcgtcagaatcacctgaattcagggcttgttaaaatacagattgctgaaccgtacctccacaatctcagattcagcagatttggagggggtccgaagaatatgcgtttctagcaagttccaccggttctggattacactttaagaactgctctcagagattatctacatggtcaattccaaatctatcaagaaagaaggcacacagttactgatttctgcaagctttgaactagcagtatctttaaggagaagaccccagccatctctagcagtgtggggaagagtaaaaggcaaagcctctagttccggaagatccagaaactggcactgcctggtccagcattttcattttcccactgaggaaatgtaggcttagagggaatcaatttgtgcagtctcccagtgagtccgtggttgtgctgggacaaagtacccagttgtcctggcttccactccagtgctctggcccttgctggagtaaaatgggacacctgggcttggcaaggaacaaggacgccaacatgattctgattcatcccaatttctccacagccttctgccttttctctgcattggtaaaagtataatccccaacccaggaattttactctcgctttcgttcatgtcttcgtagcctaagacaggcagtcaaaatgggacagctgacagccacaacagcctttaattacaatatctggaggacacattaatgaatgtagacccatttatttacttttttatgtaccttgtctgtgcgacagcaagcaactagaatctcaggaaacaccaaccagacccaggcatcaatctgctactctgttattagaaggaaattagcctttaagaaaaattgtctaggcttaccaatcactcccaccagccaccaggggtcacataaatagaagttttcactggacctttctaattcacaaacctaccctcttccaccacaggccttggtagaacacataattcagcagcaagaatcccttgaagaagaaaagaaaacacctataaaactatatttttttctaattccagagacatgaaaccctttaggagtttaggccagggttcatgacaatccattatctgaaagcacagatgtacagataaaccattatttttgtaaagatacatcttctaaaacaccagtcagcttggcattgtgtttgtccttgaattgaagaacgatatcattttatcgtcctagccttgagcatggttatcaatgccagtaactaagaggcctaatttgaaagatggtcatgatgtccgacttacaaatgccttctactcagttaacagggactgctgaaagcaaatggcttatacattgttgcacaagtggaaaatctggcctcctaacagttgttaaatgtgccagctaagagcctctgaaggtcagtctaccagggctggggcagtgaccacagccacgtgctgcgccttttgcagctcagcaccgcatggtgcagctgttgtattggccaaagaaagtgctggcagccccgggagaaacagagacttaattcacttgcaggaactttcctgaaagagtcttttaaaaagcatttaaggcagaccaggtgcacttattttctttttaaatctcattgctttgtcaagtattctcgtttatggctccaacactctttatgtgcaacattaaccatcctttgttacattataaattataacgagaacttttataaaacatatttaatgataattcatgatttctaggtagattcctttagatgtataacatttaaatatccatggtatagcactcttgatatgtacatagcagggattgcaatttaggttgcctggggttttgttaaaagttttgtaagttgtgcagactttatctttaaataaaactgtgtgtgtgtgtgtgtgtgagagagagagagagagagagagatacacagtgcttagatataaacagtagtaaaagaaagctgattcaattcagtatgttacactgttaagacttccagctgtcaagtgcttccactataaacaggaggcgggaagaatgggatctagagggaatagagattgcataaaagtgaaacttcatgatgtgagggccgggggttggactcaagtcatcatctatttaggtgaaaactgccaataccctgaataattctaggaaatactctggtccttcactagactctgaaagtactcaggccacaaactctcccagtcctagcatgacaaaagacctccctatgccaataagtaaaaatgagtgccagagccatcctcaaaggtaaatatctggggtaggcagctgtttgcataatgtgattttaagtgtgacaagcacgtactccacccaaaaaaaaatctatgctatagacccaggtcacggatgcctgcaattctaccattagggagtatttccatcccagtcagagacttaggaatcatccttgactcctctctctccttctctgaccccattcaatcaatcatgaattcctccttcctagcttgactctgtccctttatcttcattccctctgacagtacatagttcaggtcaccatcgactcctgccaggatgactgtggttacctcctgacctgtctgtgtgcctccaatttgttctccacactgcaactgcaacaaatgtgatctttctaagatgcagatctgattatgacagtccccagattaaaaccattagctgggtcctcaaggccctcagaatgaagtccagattcgttaatggggtttacaagcccttatgctctggccatggctgaccactgtgggctctcctatgccactgcctccccgtcagtgcactcacctttccttagtcccttacttttgcttccaggcctttgtacacattgtcccctttgcttggtacactctccccgtttcctacctttgttcccaaagactgcatgaccctaaatttatccctactttagcactttcttactatgtaagctttatccatctgactctaattctttctgaattaggactatgtatttcacaaatgccagaactcttacttattcactactttatttccaggacctagcaaatacttgtctcatagcagtcactcaataaatatttgttgactaaatgaacaagtgaatcagtaaatgtcttatcttttattaacaacgttagcaattcacacttcagtgtgatttttcttactacagctctctaagaatatatttgagacggttaatgaaataaaggcagaattggctctggaaaaccaggggacagtataaaggcaatggttagccaagaaagaaaggcactgagaaggaaggtaagaacaggttctattgggattgcttagataggggtcctttctagataaaaagaaaatagcggctgggcacggtggctcatgcctgtaatctcagctctttgggaggccaaggttgggtggatcacttgaggtcaggagttcgagaccagcctggccaaaatgatgaaaccctatccctactaaaaatacaaaaattaaccaggcatggtggtgcatgcctgtagtcccagctactcaggaggctgaggcagaagaagtgcctgaaccgaggaggtggaggttgcagtgaggcaagattgcaccactgcacttcagcctgggtgacagagcaagacttgcgaagaaagagaaagaaagaaagaaggaaggaaggaaggaaagaaagaaagaaagaaagaaagaaagaaagaaagaaagaaagaaagaaagaaagaaagaaagagaaagaaagaaagaaagaaagaaagaaagaaagaaagaaagaaagaaagaaaaagaaagagaaagagaaagagagagggagggaggaaagaaaggaaagaaagaaggaaaggaaaggaaaggaaagaggaaggaaaaagaacttaaaaaaaaaagcaaccaaagcttgagttctgttcctgatttcatccccaaggttaccaccaagaaaggtggttttcctctgcatgggttgtacagtgaagtacccgcacttggcctgtggctccacccacagctggctcaatgactgtggcctgtgccatggagaagctgcaagaacaaggcagagtggactggacagtctgtgtcaccctggccaatttgaccaaacttatctagtcacagatggttatgaataattttttgcttatcacagcctttcggaaaagtattaaagtttcagcagcccatgcttcatgtattttcctccccaagtatacccttttacctataatcagtatagcggaaggataagatgtaaaatgtgttcactggtttattagtttgttatactactgacctcagtcaatcacccggtgatgtttctgggcaatacaaaaatatcttcttccttctatcccgtgatagggggtattttctaagcctcagacatgagcccccactttttttcctctctcttctttccttggtgaaccaattctacatactgatgatgcctaaatctaatacatccaccttgacctcataaacagaatccacccccacatatttcattgtctgtaggacattttcctttggacagctcatcaatcaattcaacaagcccaaactaccttgttatcttaccttcctccaaaaaaatatctgagccacagctgcaacatcctaactttttccagtacatcattaatctcctagtcacatgtcagaaaactcactccttccactagaacataaactgtcacctcatcaatgagggccaccttgactactccatttaaaatttcatctctatggccccagcattcttgattcccccttaaagtgctctgtttgttcccagcatttattgttttctagtatgctacataatttacctatctacttattatttctcattctgtccccaaatcttactagaatgtaagcaccactgaagacagagacttctgttcacagatatcatccctgtgcttataacagtgcccgacatacagtaagtgctcaataaatatttgttcaattaattcattcactctacaagtatatacttaatataacaaataatgtaacttaaaataccttactcctctaattggaatttacactctgtgaagtagaggtctttgacttctttgttcactgctgtgtccccagaatctagaatggcaccaggtagcaaaggtgttcaataaaaatctgttgaataaatgaacgaatggataggaactcattgagtaccttttagtaccaagtactaagtgaggtgcttggggattctagatattttaaataactaactatgatgcaatgggataaatataaataatagaagtaggaacaaaatggcatgggaactcaggagcaatggcactgaagatcattcttcacgcctgagtctgaaagaagacacagatgtttatctgctccctgtgccaggtaaagggccacaaagggattaaagtgtatggtatggcgcaatgtttctcaactgttatttccatatgagttacctggggactcttgttaaaacagactctggtttgatgggcctgaggtaagccctaagatttcacatctctaacaaggtgttgttgaggctgctggtcctcaaaccacacactgactgacaaatgtacacaactcggcacccatcccccttatttctttttactagactaaaattttgtctatgtatctaacactccctcctccagtatggagaggaagtggttctagtcccagctccagggttagactggatttgagcttggccaatcaggacaaggcattcttttgactgattactgggtgagaatgggaatgggaagtaaggatgcatgatctgtttaggggaaaggttttcctttctatgctgctgtccttaaacaaagaagcgtatggcttgatggctacaggcagccatcctccaacatgagaagcatgagcctcaagatgaaccgaatgccaagggtgctgagtggagagggggagagaacctgggtccttgatgatcacttagctgctgattgtgttgatcctggaatctactctacctctgatctttcaggtatgtgaaatgataaatatccttattgttcaagccaatttgaggtcaaggcttctacttgcagcagaaattatcctaatggttacatctgatttttgtttatttgtttagggaacaaatatttattgaatactactatgtcccaggcaccagaaaaataagacaggcataattctctaccctcgtaaaatttatagcctagatgataaattaatttgatagagttcaaatttctgagatgagcacgatttcattttaaattatttatattcttggatggggactacttctccctccctagccctgcccctgaaatagttctttattagtcatctctgccctagtacaactgccttcatcctaaaacagagctttgtctccttacgcttgaaaattgcaacagtaccctaacacccctctcagatccaatctacaaactagtaccctattaatcttcctaaagcatcaaattcacgagagaaaattctccagagaccctccattgcttaaagcagtgattttcaagcttgctttatgaaagcaaaaaactgtttcttcaaaagcaaaaaaggttattatacaaagtcacaatgtattaaatagacaaactagtgctgtgctgtagaagtgagggacacccagaatctcatcccctccccaaccccattcctacttcacttcccaacacacccacttcctgaggagtggtagagttcaactggtgccttcacttcacatagtttcacaaacagtagccttgtcatagggtaaaattaaaaatttccacttgtcattctattacctgcctctgttatctgcccacattcttgatttgaccaagtccagcctccccactacccttcaaacatacacactcaagtctttgcctaggctattacttgcatcagaaatgtctgggccaggtgcaatggctcatgcctgtaatcccagcactttgggaggcagaggctggtggatcacttgaggtcaggagtttgagaccagcctgggcaacatagtgaaaccccatctctacaaaaaatacaaaaattagctgggtgtggtcgctcatgcctgtaatcctagctactcgggaggctgaggtgggaggatagcttgagcccaataggtggaggctgcagtgacctctgatagtgtcactgctcttcagcatgggcgacagagaccctgtctcaaaaataaaaaaataataacaataaaaaaataaaagaaaagaaagagaaagagaaagaaagaaataagaaaagctgtgtgtccatgtctgtgtctatgcaaaacagatacacctccactagaaacctgaaaacaacatggaacacacactcccagcatccacatagcaggcatgaccaatcgatcccaatccatcagtctcacttcctctgagtttggtagctccacagtttgtttccatgcatcacatcagtcaaccactatcaatcctattatttaacacgcaaaagaaatgtctttttggccgggcgtgggggctcacgcctgtaatcctagcactttgggaggtggaggcgggcggatcacgaggtcaggagatcaagaccatcctggttaacacggtgaaaccctgtctctactaaaaatacaaaaaaaaattaaccgggcgtggtcacggcggacgcctgtagtcccagctactccggaggctgaggcaggagaatggcgtgaactcgggaggctgaggcaggagaatggcgtgaacccgggaggcggagcttgcagtgagccgagatcgtgccactggactccatcctgggtgacagagcaagactccgtctcaaaaacaaacaaacaaacaaaaaaaaagtctttttatcctctgcagtaaatacagcccttattccatcattttatggattcacattggcacttaattataaaagagtctgatgtgtgtgattccttagttcaattataaatgactggaggctaaggcctgtattttctcttctttcccctggatttttggctaagctgtagcctcttagcaggtattaaataaatacatacataatgaataaatgttgacaactattaatttgtgtcttctaaagcatactgatatgatcaccacaccatatcaaaacacgagacagccccttacagcttgaataactactttaggaatcaagaaatcagagctcttctgccccaggagcactgctaactagtcatgtggtccttttatcttctgggcctcggttttcctcacctgtaagaaggaacttgattatattatttctgagggtcaatattagggatgttcttcaggtttgctaggagaagaagcactcagattaccaggttgcctgtgggagtggagttcatcctccatgtccctagctgtattctgagttcctggacttcccagtcatggcctgatgccggaccttatggagaactggcacaacatttcctgccatggagtgtgactacccttctctgtgtgaaagcatcatcagtttattcctgtcaaacagactctgtcggtcgggtagagtttcacaacaaactctgttgaggcttttaacctcctgcatacctggcttcccatgattgtctttgcctaggacaccctggtctaatcagctagggccaaaacaatagggtcagtttcactcagggaatagtcaagccactttatgtagggaataactgatttgggtcatcattctcagaaaagggggctgtaggtgtggcataacctacagctccataaactcttttctctctctttctaaaatgttttatgagaattaaccaaatactgacaatcaatataaagagcattaagaaatgtgcagcatgaatgaaagattacattattcacttagcagtaatttaatctttctgcacagtagaaacgcatacagaaagacctagagaagaggctaactcacaaatggcaggaaaccaactccccaaaagactttttgggatccagagatcttaaacataatgtagtgttcctccagtatttaaaacgaaagaaatatttttaagagtacacagggagtaaaagtgttttataaccttctgacatgtagctaattcaaacacagcctgcctggtacgtgctcggccacagccagtaacaaaatctccagcctgtggaccaatccccagtcccctctcctaggatccagacacaagtgtgctttccagaatgggttggagtgtgctagcccacacatctcacttaagcagagaaatcaggggctgacccttgagtccaaggcctttggcaatggatacacttttataaatagaaagaaacaaaatatggcactatgttttcaactatcatttcaaaagcagatttaagaatgtcaggatcattactgttacacccagaagatagcacagaagatgccacaggatcacccaggcagcatttcatggggaaaggagcctagacttggctttcatacagccctaggattgaattcctattttgccttccccagtttgcaaaattttttgcaaagtgcttaatattaatagtagttaccattcatcaagcacagtaggccctccttatccatgggttccacatatctggattcaaccaacctcagatcaaaaatatctggaaaaaaattgtatctatactgaatatgcacagactttttttcttgttgtgatttcctaaacaatacattatattaataacaatgatttatatagcatttatagtgtattgggtattacaagtaatctagagatgatttaaagtatgggaagatatgcataggttaaatgcaaatatgacaccattttgtatcagggacttgagcatccttgcattttagtatccatggggagtcctgggaccaatttcccatgggtgctgggggataactgtactttattctgtgccaagggcatgatatgcataatgatatttactctttacaagaaccctgggaggtaaaaattattgggtctctgagatagtaaccttcccatagccagttaacgtgtaggagggaagccaagattcaaagccaggtctgaagctccttactgcctttcctattcatcctctctgagacttcatttcctcatttatagaatagctataataacacctcccttagaaaactgtagggagatttccattttgttttattgtaaacatgcctggaacatagtgattgcttaataactgttggctagtaatataaatgtatacatgaaatactgaagtcacaaaagggcctgctggccacagactggtttccttgatttccagtctgctatttatttatttatttttgagacagggtctccctctgtcgcccaggctggagtgcagtggtgcgatcttggctcactgcaccctccacctcccaagttcaagtgattctcctgcctcagcctcccgagtagcagagattacaggcgcccgccactacacccggctaatttttgtttttttagtagagacagggtttcaccatgttggccagccaggctggtctcaaactcctgacctcaagtgatctgcctgcctcggcttcccaaagtgctgagattacaggcgtgagccaccatgcccagccttcagtctgctttttaaaaacatttttttaagaagtctaattgaacattaccacaagcacaaaatgtagaattatatgaaatcgccccacatccaatcacacatatatagtttcccctccccagctttagtgaggtataagtgacaaaaattgtatatatttacagtatacaacttgatattttgatatatgtatacattacacatagttttttgtatattttcttctgctgttttcccacgtgtctttttttaaagattgttatagttttatattctttttttcttttttttttttctgagacagggtcttgctctgtcacccaggctggagtgcagtggtgcaatcttagctcactgcaacctccccccactgggttcaagtgattctcctgcctcagcctcccaagtagctgggattacaggtgcacgccatgacaccaagctaatttttgtatttttagtagagacaggatttcagcatgttggccaagctagtctcgaactcctggcctcaagtgatccgcctgcctcggcttcctaaagtgctgggataacaggcatgagccactgcacccggcctatagttttatattatattttttcacttagcattatcataaatatgaatatcataaataatatgaatactatgctacatcctatttatgcttagcatctttaatcacaaaatcagtgaaccattctggaatatttttttctcctttggatgagtttgggccctgtgtgagagaaatctagaatagaatcctcagctccaccacttatcaccacatgactttaggaaagttcttaactctctaagcctctgtttacttacttgtaaaatagggataatgattcctacatcagaggattattgtgaagattaagtgaggtaacacttgtaaagcccctatgcttttactattcacaataagcttttattaactctagctattcttaactagaggcttctccttcccccatccaaacagcattacttcacattttctgttaatcaatggctttagagaaatatgcttagagattacattggtttaagagagggagaggtgaaaggggagagaaaaagaaagcctgggagcgggaaggctctgctaggctctctgactgcacaccacacctgccttagaccttttcttgcaactcttgcaactgcaggagcagcaggggttcccaggctgaaattccattctcaggtagctcacagggcagatctggtcactgctgggatgtgtgggctgtgcccacctgctccctcaggcagcctcattccacactggctcccttgggatgaccgaagcctctgtggcctgggatagaggcagctggggaggtcagggcagctttctgtgttccgtgagagcttctcagttgtctgaaatcctcagccttcaaagtagagctgatccctacccagaaatgtgaaactgctgtgagtcaaataaatcattaataggcaagctgggaaagaatgggcagtaaagaagacaaagggtcaatcctaaccctcctcagaaggacggacttcacatgtgccctctacttccttactccattgcctgcaacacacaagatgctttttgctgcccaggaagtctccagaaacattccacacaattgagcactccctggttctggaaacactctattctcttggctgccatgatgtcatcctctcccgcgctttcttctgcttttctggatgttccatctctccctccttcgtctgccatttctcctctacttgacctctaaatgtcagagctccttacgggatggctttaagttctgtcctctttatgaactttccatctccctagatgacctcatccatttccatgatttgaaatatctaattctaaatttttatctccagctcagacttttctgagctctagacctatttgtccaataccatggatacacacatctccacttaaatgtctctaagatcttttgtaacttaacatttctgaaactcttgatcttaacaccccaatacacattcccccaaagtgtcccttcattcagtgctactctcctagtaaatctcagcgattcctatctgctcagtagttcaagcatacctgagacctagaagtcatctttgattcatcctcttccctcaccacgcccatccagttgatcacaaatctctctcaattcctcctctacaatatttcttgtgtcttcccactgtcaccgtcctggcccaagccttctcttctgatagctagctagctaatcaccctgagccctccatatggaaaccagggatcatttaaaaacatagtaaatggggtcatgtcactatcctacacaaaaatacttcaatggcttcccattgcacttaataatagccaatgtgtcaggcactttgcagagattatcatgcattacacaggtgcattatcttagtcttcacaaccctgtgattaccatcctattttacagataaggaaactgaggactggagaaattaatttgcccaaattgacaactagaacagtgtagagttaagatttgaactcagtcagtctgactccaaaacccaagcctctcaatcaccactgtcctgcctttcacttaagacaaaacccaaattccctaacataacctaaaagactctggcttctaccgcctctttagcaccatctccttctgcatctccatctttcagtgtgttctagccatgcgggtctcctttcagtgactctaataccctaaggggccatgaaaattatgtttactacaatttcattatagcacagggaaatggctaggatatgacattgaatgcactaaatgaaaacacataattgcttatatcatatatgcctgaatatgagcaactttgactattatacagtcccaagttatcctgatgaaaatattaaaacaattgagtttttatgggcaggtgatagaaaacttgaataaacttttagcaatggggatgatttttttttctaatgaatcccagaagagaatgctctttttagtagtcaaatcccagaagaaaatgctattttttagtatgtttaactgaaaaagcttatatttccacttcaatttaggaagttcttcttcttcttcttcttcttcttcttcttcttcttcttcttcttcttcttcttcttcttcttcttcctttttttttttttaagtggggccttgctctgtcactcaggctggagtgcagtgacacaatagcagcccaactgctgggttcaagtgatcctctagcctcagccttccaaacactgcattacagatgtgaaccactgtgcctggccttaggcaattatttttgacagaaggtatggaaactaatgttgcattataaagtcctcatcaaatatctcatacttaagcaaagaccccaaatcatagtttgtagatttactgcagctttcattcaaaatacgttttttatcatctgtcacacaggaaaaccctgatacctgatatcttcctatcagcctaaagaaataagaaacacaataggacagtgattatacttttaaatattagggagtttagagccccagatattctatatgcagaccactatgctcatgtttatgtcttttttttcttaagtgttagaaatgtttatttgtcaaaaaattatttaaaaatgggaggagtggagtaaaacaaggctaaatttcagctaatgctgtaccacgatcacaggtcagatataaaaaaacaaacaacacaacccccaatggtcctagcaatttcagaagattaacttcaatgttagagtccagaactaacagagaagagtaaaaggctgcttgccactacatggtcatttgaaagagaaaggagatgctgcaggtaggcagggagaagtattcaactcctagggaaagcaagataagaggggttccactgcacaggaaaaaggggatgccagcataatccttacctagggctgttcagaggctgagaatataaggaacagagtaaaaaaggctacagagactagtatcaggaggaaagaaaagtcaacttagaagaattaaattaagaaagaaaacatagttggtcacaaactccttttgtttactgaaacgtgaagcaatggaaacatcctggcaaaggggaccgcacggagcaagttctcatatatgcccgcagcccgagggttcagtcagcaattattctacctccagtttttaaaaggctgagtaccaggctcggtccatatagtgctcccgttcataccgggccatgtcgtgtagagaattccgtgtagctgctgaagcctgaaataactcactctctggcccataaccgtagccctctccaactgtggggagcatggctgcagcatgacgcggttccacaataggaggaagtggtggccggagcggcagccatagtagctgaagtggcagcagcacaagaacttggcaataggtatctgtcttagggattagcagaagtagagttgaggtggctggtcacagttgtactttggacttgaggcagatgggacatggtctgctctgcctagttacatgcagaagctgctgccgctgctgctactgcctcgtaagagcagacccagtatcgcttatagtagtggagtgctgcatatgcatcgttgtaatacctggattccccatagcccatggtgtaaggcgtgtgaactgctgcatattgttcattacactgctcagtaaagtctgccacacgacccgtacgatctactgggcactctttggaccagtgaccttctttcttacactgatagcagccacactggtctcccattccaggggcagtccgaagtcgggcttgtggacaactacacatgcattatcttgccttgaaactctgtgttgtcaaggcccctgacggtctcactgcgtcctctgaccactccatgtgtatgaagtgtatgaggacataatctttcacgatgtcacattcaatgactggaccatacttctcaaacttggcttgaagctcttggttggtacaagtgggactgatgttacccacgtgtaacttggttgacgctttgctcttattcttgctggcttccacgttgatgttcaccccatgaagcttgtaatgatgcaagttgtgtatggtatcctcagccgccgtcttgtcttctatgtgtacaaagccgtagttcttaatgatgtcacattccagcaccttccctactgcttgaaaagagagcggatctcctgctctgtggcctcctggggcaggtttctgatgaacagcttcatcatccggacaagcacctctgggtggcagcggcggaggtagctcctgcgtcagagagaaccctacaaaatcgtttgtcttgataaaagaaaaacttcagccgaattaaatttaaaagagtttaattgagcaacgaacgattcacaaattcggagccagagtaggatcagagaatccagcgcagccacatggtagaaggagatttatggacagaaaaaggaaagtgatgtgcagaaaacggaagtgaggtacagaaacagccagattggttacagctcagcttttgccttatttgaacacagttcaaagagttggctacatgtgattggtcaaaactcagagattggcacacgtgtgggctacggtctgtttacacctccacttgttatagttcattatgcacggagaaacctaggccaaaattaaaatatgtaaggaggcagctttaggctaaacttgatttaacaatcttaataagatccctgtccaaaggctcacatttctatagaagctacagtttttcaattccaaggataggtaaaaacagggcagcaccatgatctataaaatctagagttatggctcagagttagggccgtttcttggtgacattgtgatggtttagctggtctacaacaaatctatgagggcagaacttggaagtgttgactgccttcacggcatggaaggcctcagccctgtgcaccacagcgtggttgtgctcctgccccgtggtcagataggacacgcttgttcagtagtagttctcatggtctgcagcgcggccgccagtgcttccagatccactgccttccaggaatgccacagcaacagaggagggcagtcaggaacttggagcctggggctgcactcatcagacagccaagtcgttttggccactgatgcaaagatgaaatgtttaactatcttcttacaatatttaacttggtaatttagtttaaaatgcatatacaaaattgcaagtattaaaaaatgttatttttaaaaattgccttttcccactcacacatttcatgaaaacattttattcaaactttttaaaggcatgtttcatgtcagtgtcttccatcacctctaaagagatgttctctaccaattttcctgaccacctcatcttcacttctatccaaactatttgccacatagtacttttttcttaaaaacaaaaaaattattacaggctgggtgtggaggctcacgcctgtaatcccagcattttgggagactaaggagggaggatctgttgagaccaggagttcgagaccagcctgagcaacatagggataaccccatctctaccaataaaaaaaaaaaaaaaaaaattagccaggcatggtggtatgcacctgtagtcccagctactccagaggctgaggtgagataattgcttgagcccaggatttggaggctccagtgagccatgattgtgccactgcactccagcctgggcgacagagcaagattctgtctcaaaagcaaccaaaaaacaaaatttattacagaaaatttcaaacacaaatagaagtatatagaaatctcaaaaaaggccgggtgcggtggcttatggctgtaatcccagcactttgggaggctgaggctggcgggtcacaagttcaggagatcgagaccatcctagctaacatggtgaaaccccgtctttactaaaaatacaaaaaaattagccaggcgtggtggcaccacctgtagtcccagctactcgggaggctaaggcaggagaatcccttgaacctgggaggcagaagttacagtgagccgagattgtgccactgcactccagcctgggcgacagggagagactccatctcaaaacaaacaaacaaacaaaaaaataacctcaacaactatcaactcatggccaatgtttcgttcataatcctccatgccctccttcctgaattgtttttaagcaaatcccagatatcttatcatttcacccaaaaatatttcaatatgtatcccgaagagaaagctctttttgagaaatataactgcaatcacattatagtacctaaaaattaataatgccttcacatcattaaacatgtagcaagtgttcagatttccccaattgtgtcataaagttgtttaaattaggatccagactaggtccataacttgcatttagttgatatgttttttaattatcttttaatctatgggtgtcctccttcctctggctcttttttccttgcatgcaattcatttgttgatccgccctttagagtttcccatacctggaattttgctgactgcattcctgtggtgtcttgtatcatgttcctctactcccctttatctcctgggaaatagtaggtggctctggagactttatcacattcacattctatttattggcaagaatatttcttagcactttcatcaagaggctaattggttggttgtttttctttttgtgttattatagccattaatcatcactacctagattcactatttcagaaagggtgcaaaatggtgatactctgattctatcatttcttcttcatttattagctagaatacttctctaaggaaaaatgttctcttatcaacttttgattatcctaaggtgcagtcttcaggaaaggcaagataaatgtgtgattccttctttttattagttttcagaataatgggttggtttcctaacatccatcaagagtgacctaatgtctaggtattacttagttttctttttgggtgggcatgatggctcatgcctgtaatcccaaaactttgggaggccaaagtgggaggatcacttgagctcaggagtttgaggctccagtgagctatcattacaccattgcactccatcctgggcaacagaccaagaccttgtctcaaagcaaaaatggctgggcgtggtggttcacgcctgtagtcccagcactttgggaggccggggcgggcggatcacctgaggtcagttcaagaccagactggccaacatggtgaaaccctgtctctactaaaaacacaaaaattagccaggcgtggtggcaggcacctgtaatcccagctactcaggaggttgaggcaggagaaccccttgaacccgggaggcggaggttgcagtgagccgagataacaccattgcattccagcctgggggacaagagagagacttcttctcaaaaaaaaaaaaaaaaaaaaagaaaaacaaggctgggagaggtggctcatgtctgtaatcccagcactttgggaggccgaagtgggcagatcacttgaggtcaggagttcaagaccagcctggccaagatggtgaaaccctgtctctactaaaaatacaagaattagccaagcatggtggtgcgtgcctgtaatcgcagctattcaggtcaggtggctgaggcaggagaattgcttgaacccaggaaatggatgctgcagtgagctgagatcacgccactgcactctagcctgggcaacagagtgagactctgtctcaaacaaaaacaaaaacaaaaacttaattttgttttatcttatttgtgatatactactttttattttatacaggctcctggccgtggaatttttattataagctacaaccaaccagttataaactatcaggatagttgacctttttttcagtagataatcatattttatcgacagatgttgaatttttgagatagaat

SEQ ID NO: 23 - DNA, 188682 bp, Homo sapiens
ggaattcatcacaaaaagatcatcgcctagacacactgtcatcaaattatctaaagttaagacaaagaaaagagtcttaagagccatgaggaaaaagcaccaggtaacctttaaaggaaaacctatcagattagcagcagatttctcagcaaaaactttacaagctagaagggattgcagccctgtcttcagcctcctcaaacaaaacaattatcagccaagaattttgcacccagcgaaactaagctacataaatgtcggaaagatacagtctttttcagacaaacaaatgctgagagaatttgccactaccaagccagcattacaaaaactgctaaaaggagctctaaatcttgaaacaaagccagaaaacacatcaaaacagaacccctttaaagcataaatctcacaggacctacaaaacaaaaatacaatttaaaaaacaaaacaaaacaagaaaaccaaggtatacaggcaacaaatcgcataatgaatggaatgatacctcacatctcaataccaacgttgaatgtaaatagcctaaacattccacttaaaagatacagaactggccgggcatggtggctcacgggggtaatctcaatactgggaggccgaggcaggcagatcacaaggccaggagttcgagaccagcctggacaacatggtgaaaccctgtttctactaaaaatacaaaaattagccgggcgtggtggtgcgcgcctgtaatcccagctactcaggaggctgagacaggagaactgcttgaacccaggaggcggaagttgcagtgagccctgattataccactgcactccagcctgggtgatggagtaagactccatctcagaaaaaacaaacaaacaaacaaacaaaaaaaaaaatacatatataattgcagaacggataagaattcaccaaccatctgctgccttcaagaaacacacctaacacataaggactcacataaacttaagctaaaggggtggaaaaagacattccatgcaaatggacaccaaaagcgagtaggaatagctattcttataccagacaaaacaaactttaaagcaacagccattaaaaaagacaaagagagtcataaaaggccttgtccaacaggaaaatatcacaatcctaaatatatatgcacctaacactggagctcccaaatttataaaacaattactaatagacttaagaaatgagacagcaactataatagtgggggacatcaacactccactgacagcactagacaggtcatcaacacagaaagtcaacaaagaaacaatggatttaaactataccctggaacaaatggacttaacagattatacagaacattctactcaacaactgcagaatatacattctattcaacagcacatggaactttctccaagatagaccatatgagaggccacaaaacgagcctcaataaatttaagaaaactgaaataatatcaagtactctctcagaccacagtggaataaaatggaaaatcaactctaaaaggaaacttcaaaatcatgcaaatacatggaaattaaataacctgcttttaaatgatcattgggtcaaaaatgaaatcaagatggaaatttaaaaattcttcgaactgaacaacaatagtgacccaacctatcaaaacctctgggatacagcaaggcagtgcttagaggaaagtttataaccctaaatgcctacatcaaaaagtctgaaagagcacagacaatctaaggccacacctcaaggacctagagaaccaagaacaaaccaaacccaaacccagtataagaaaggaaataaccaagatcagagcagaaataaattaaattgaaacaaaaaaaatacaaaagataaatgaaacaaaaagctggttctttgaaaagataaaataaaattaatagaacattaacaagattaccaagaaaagaagaaagaaaatccaaataagctcaattagaaccgaaaagggagatattacaactgataccaaggaaatacaaaagatcattcaaggctactatgaacccctttatgtgcataaactagaaaacctagaggagatagataaattcctggaaagataaaaccttcctggcttaaatcaggaagaattagataccctgaacagatcgacagcaagcagcaagattgaaatgataatttaaaaattacaaacaaggcacctgggaggccgaggcaggtggatcacctgagatcaggagttcaagaccagcctgcccaacatggtgaaaccctgtctctacttaaaatagaaaaaagtagctgggcgtggtggtaagcagctgtagtcccagctactcgggaggctgaggcaggagaattgcttgaacccgggaggcagaggttgcaatgaggcgaaatcgcgccattgcactccagactgggggacaagaaggagacttcatctcaaaaaaaaaaaaaaaaaaagtccaggactagagagattcacagcagaagcagaagtctaccagacattcaaagaagaattggtgccaatcctactgaaactataccacaagacagaaaaagaaggaaccctcccgaaatcattctatgaagccagtatcaccctaataccaaaaccaggaaaggatgtaaccaaaaaagaaaactacagaccaatatccctgattaacatataagttaaaatccttaacaaaatactagctaaccaaatccgacaacatatcaaaaagataatccaccatgatcaagtgggtttcataccagggatgcagtgatggtttaacatacacaatgtgatgatacaccacgtaaacagaatcgaacacgaaaatcacatgatcgtctcaacagatgcagaaaagcattcaacaaactccaacatccctctatgattaaaactcagcaaaatcagcatacaagggacatacctcaatgtaataaaagacatctatgacaaacccacagccaatgtaatactgaataggaaaaagctgaaagcactccctctgagaactggaacaagacaaggatgcccactctcaccactcctcttcaacatagtactggaagtcctagacagaccacttagacaagagaaagaaataaagggcatctaagccgggtgtggtggctcacgcctgtaaccccagcactttgggaggctgaggcaggtggatcacgaggtcaggagttcgagatcagcctggccaacatagtgaaaccccgtctctactaaaaatacaaaaacttagttgggcatggtggcaggcgcctgtaatcccagctacttgggaggctgaggcaggagaatcacttgaaccccagaggcagaggttgcagtgagctgagatcgcgccattgcactccagcctgggggacagggtgagactccgtctcaaaaaaaaaaaaaaggcattcaaatcggttaagaggaagtcaagctgttgctgtttgctgatgatatgattgtttacctagaaaaccctaaagactcccacagaaagctcctagaactgataaaagaattcagcaaagtttccagatacaacattaatgtacacaatcagtatctcttctatacaccaacagcgaccaagctgagaatcaaatcaagaacttaactcctcttacaatagctgcaaaaataaataaaatacttaggaatacacctaaccaaggaggtaaaagacctctacaatgaaaactacaaaacactgctgaaagaaatcatagatgacacaaacaaatggaaacacatcccatgctcattgatgggtagaatcaatattgtgataatgaccatactgccaaaagcaatctacaaattcaatgcaattcccatcaaaataccaccatcattcttcacagaattagaaaaaacaatcctaaaactcatatggaaccaaaaaagagcccacatagccaaagcaagactaagcaaaaagaacaaatctggaggcatcgcattacctgatttcaaactatactctaaggccacagtcaccaaaacagcatggtactggtataaaaataggcacatggaccaatggaacagaaagaacccagaaataagcccaaatacttacagccaactgatattcgacaaagcaaacaaaaacaaagtggggaaaggtcaccctattcaacaaatggtgctaggacaactgacaagccacatgtaggagaatgaaactggatcctcatctctcaccttataaaaaatcagctcaagatggatcagggacttaaatctaagacctgaaactataaaaattctggaagataacattggaaaaactcttctagacattggcttagtcaatgatttcatgaccaagaacccaaaagcaaatgcaataaaaacaaagataaatagctgggacttaaactaaagagcttttgcacgacaaaagaacggtcagcagagtaaacagacaacccatagagtgggagaaaatcttcacaatctatacatctgacaaaggactaatatccagaatctaaaacaaacacaaacaaattaagaaaaaacaaacaatcccatcaaaaagtgggctaaggacatgaatagacaattctcaaaagaagatatacgaatggccaacaaacataggaaaaaatgctcaacatcactaatagatcaagaaatgcaaatcaaaaccaaaatgcgattccaccttacttctgcaacaatggccataatcaaaaaataattgatgttgtcggggatggagtgaacagggaacacttctgcactgctagtgggaatgtaactagtacaaccactatggaaaacagtgtggagattccttaaagaactaaaagtagggctgggagcagtggctcacgcctgtgatcccgacactttgggaggccgaggtgggcagatcacctgaggttgggagttcgagaccaggctgaccaacatggagaaaccccgcccctactaaaaaaaaatacaaaattagctgggcatggtggcgcatgcctgtaatcccagctacttggaagactgaggcaggagaaatcactttaacccaggaagtggatgttgcggtgagctgagattgcaccattgcactccagcctgggcaacaacagtaaaactccgtctcaaagaaaaaaaagaactaaaagtaaaactaccatttgctccagcaatcccactcctgggtatctacccagaggaaaagaagtcattataagaaaaagacacttgcacgcaagtttatagcagcacagttcgcaattgcaaaaatgtggaaccaacctaaatgcccatcaatcaacaactggataaagagactgtatgtgtgtgtgtgtgtgtgtgtgtgtgtgtattacatatgtgtgtacatatatgtgtatgtgtgtgtgtatgtatatatatgatggaatactactcagccataaaaaggaatgaattaatggcattcacagcaacctagaggagattggagactattattctaagtgaagtaactctggaatagaaaaccaaacatcatatgttctcactgatatgtgggagctaagctatgaggacgcaaaggcataagaatgacacaatggactttggagactcagggggaaagggtgggaagcggataagggataaaagacgacaaattgggtacagtgtatactgctcaggtgatgggtgcaacaaaatctcacaaatcaccactgaagaacttactcctgtaaccaaacaccacctgttccccaataacttatggaaattaaaaaaaaattttaataaaaaaatggagaaaccccatctctacaaaaaatacaaaaaattagccagatgtggcggcacaagcctgcagccccagctactcaggaagctgagatgggagaatcacctgaatctgggaggttggagccgaaattgtaccactgcactccagtctgggcaatcagagtgagacagtctcaaaacaaacaagcaaacaaatacttctagacctaggaaaagacttaaacaaccatacataataatgggagacttcaacagcccactgactaatgcattagcctgaccactgaggcagaaaactaacaaagaaattctggacttaaattcaacacatgatgaattggacctaacagacatctgcagactacttcatccatcaaccactgaagatacactgttctcgtctgcacatggaagatactacgagatcaaccacatgctcggccataaaacatgtctcaattaattcaaaaaaaaaacaaaatcataccaaccatactctcagaccacagtgtaataaaaataaaaatcaataccatgaagatctctcagaaccacataattacatggaaattaaacaacttactcctgaatgacttttgggtaaacaattaaattaaagcagaaatcaaaaagttctttgaaataaatgaaaacagagtatcaaaatctctgggaagcagcaaaaaagtataaacaggaaagtttacaacactaaacacctacctcaaaaaatcagaaaaatctcaaatcaacaatctattatatctagaggaactagaaacaaaagaacaaactaaccataaagacagcagaagaaataaaagcaaagaactaaatcaaattaagaccaaaaatacaaaggatcgatgaaacaaaaagttggttttctaagaggaaaaacaagaccgacagactgcaagctagattaacaaaagaaaaaagagagagaagatccaaataagcacaatcaaaatgacaaaggtgacaagcaaccaatgccacaaaaatacaaaagttccttagggacaattatgaacactcctatttacgcaaactagaaaacctagagaaaatggataaattcttggaaacccacaatctcccaagattgaatcaggaagaaatagaaaccctgagcagacatcagtattgaattctgaaattgaatcaataattaaaaacttatcaaccaaaaaaatccctggaccacatggatttacagccgaattctatcagatgtacaaagaagggctggtatcaatccttctgaaactattccaaaaatcaaggaggaactcactgcaactcattcgaaggatgcatcaccctgatacgaaaacctggcaaagacacaaagaaaaaagaaaactacaaaccaatatccctgatgaacataagacacaaaaatcctcagtaaaataactagtaaaccaaggctcggcacagtggctcacgcctgtaatcccagcactttgggagcctaaggcaggtgggtcacctgaggttgggagttcgagaccagcctgaccaacatggagaaaccccggctctactaaaaaacccaagttagccaggcgtggtggtgcatgcctgtaatcccagctactccagaggcttgaggcaggagaatggcttgaacccgggaggcaggggttgctgtgagacgagatcgcgccattgcactccagcctgcgcaacaagagccagacaagagcaaaactccgtcgcaaaaaaaaaaaaaaaaaaaaaaaaatatatatatatatatatatatatatacatactagtacaccaaatccagcagcacatcaaaaacttaattcactgtggtcaagtaagtttcattcctgggatgcaaggttggttcaacatatgcaaatcaataaatgtgatccaccacataaacagaatttaaaataaaagtcatatgaccatcccaacagacatggaaaaagctttcaataaaatccaacatcccttcatgataaaaaaaaaaaaaaaaaacctcttgaacaaactagacatcaaaggaacatacctcaaaacagtaagagccatctatgacaactccacagccaacatcatactgaataagcaaaaaatggaagcattccccttgagaactggaataagacaaggatgcccactcttagcacccctattgaacacagtactggaagtccttgccagaacaataaggcaaaagaaagaaataaaaggcatccaaatagaaaaaggagaaggcaaacaatatctcttcacggaaaatatggttctatacctagaaaacctgaaaggctccaccaaaggctcctggaactgataaactacttgagtaacgtttcaggatacaaaatgaacaaaaaccagtagcatttctatacaccagtaacgttccagctgagagccaagtcaagaacacgatcccatttacaatggccacaaaatacaatacaatacaatacaatacaatacaatacaatacaatacaatacaatacaatacaatacaatacctaggaatacatctaaccaaggggatgaaggatctctacaaggagaactataaaacactgctgaaagaaatcagagatgacacaaacaaatggaaaaacatttcatgttcatgaagtggaaaaatcaatatcattaaaaataaaaaacatttcatgttcatgaagtggaaaaatcaacatcattaaaatggccacacagcccaaaggaatacacagattcaacactattcctatcaagctaccaacatcattttggacaaaactagaaaaaaactattctaaaattcatatggaaccaaaaaagggcctgaacagccaaggcaactgtaagtaaaaaggacaaagtcagagatatcacattacccaacttcaaactatactataaggctactttaaccaaaaaatcatggtactggtaccaaaacagacacatagaccaatggaactgaaaagagaacccagaaataaagctgcacacctacagccatctgatcttcaacaaaattgacaaaagcaatagggaaaggactccttaattcaataaatggtgctgggatagctgactagccatacgcaaaagaatgaaactggacccctaactcaagatagattaaagatttaaacagaagacctcaaactgtaggaatcccagaagaaaaaagaggaaacaccattctggacatcagccttgggaaagaatttatgactaaaagcaattgcaaccaaaaaactgacaagtgggacctaattaacctaaagagctgcttttgtgcagcaaaagaaactctcaacagagtaaacagacaatctacagaataggagaaaatatttgcaaactatgcagccgtcaaaggtctaatatctagaatctgtaagaaacttaaatcaaaaagtaaaaagcaaataatcccattttaaaaatcggcaaaagacatgaacaaactttcatcaaaagaagacatacaagtagccaaacatatgaaaaaatgctcaacatgactaatcataagagaaatgcaaatcaaaaccacaataatataccatttgtaccagtcagaatgacaattattaaaaagtcaggcctcggatttctggactgatagtgagcactggcttcaacttaaagtcaccaacctcaccagtccctaacaagaaagtcagcctgtactttgaagttttgaagccagccactgacatcttttccctagctatgacagtcctagatgacaccatcttccagtagaaagctgtttcatctacattgaaactctgttgtttacagcagctacactcatcgattaccttaactagatcttctgataacttattgcagcttctatatcagcatttgctgctagtgggtggtttcttggcccacctgaagggcagacagcttttgcttctacttgcccatcagaaacatgattttttgcctggagtcagaatgaaaaatattcctatccttcccccatcagcagatggcttttccttctctctctctcccttaggacaagtatatcatgtgcaaggattggaagacaatatttttaaactcaatcctccccagtttgagcttagatcaaggcaataagaatcaaaatcccagaagcctttctggtatgtcattacacatcactttgaaaggtgcatgccaaaactgagagaaagtaagataactgactgcaaaggaacacaacacaactttttgaggtggtagaaatgttctaaatcttgatttgggtgagttacaggattatacacactttgtcaaaactcatcaaactgcacacttagagaacatgaactttattatataaaaatattaatgatcctatcttttaaaacttcagccagtttttctagtagaaattgacaagctggcaatcttagagtttgtgtattttcttcaatgctgctcagaactctgacagtagaatttgtccagagttagcattttccaggcagatgccacagaacaacaatgatataagggagttaaagatattagcaaaagaatggttgatgaaatagaccgagcagagaaagaaattttaaaagagggaggggaactaatgagcagggagaggaataaagtagaaacattttgtgaacgattaaagagcatattcctatagaaagagaagcaatcttttttaaaaattgacaattgtgccttagaaatcaaagagacttcaccttcatggctaagctcaagatgaagccatccacatgatacagcaatagaggcagcactatactaacaaatctcattaatattaaaccaaacaagtaatctaatggctacattattctccaggagtaaaaagtttgcttcaaggcagctcataatctggctcactttaaacaaataagtcaaagatcccccaaatgaatccagtaaacacgagaattttctatatttctatatttctatgtcaatataaaatacacatacaacacaattttctattttcctgacttggcaaacacaatataatgtacagagtttcatctgtctttgacatattgtgaattttaacacctcagaatatcatcataaaggtaatgtttttaatcaaaggcccccaaaaacgttattcttgactgagtggctttagagcatgtactcttctagttgcttgggaattttgtggagaacaagttacccacaaagtacctctcctggaagttaaaacagaggatttcttatatgcttaggcagacatactctagaatcatctttttaaaataagcaactagcaaatgcaatctggttttcctattgctatgttttggatatgtcccctccaaaattcaggtgctgaatctaaacggtcaatgtcatgtattaaaaggtggggtactttcagaagtttgaggttatagtgagctatgatcatgccaccacactccaacctaggcaacagagcaagaccctttaaaaaaaatcaggcctttaagaggtaattaggtcatgagggctcctcacctcgtgaatgggattaagaccctaatgaaagagatttcacccctgtcctttcacaatgtgaaaacacagcattcctcaccaccagaggatatagcaacaagacactatcttggaggcagagagcagcccttattggacaaccaaacctgctggcagcttgatcttggacttcccagtctttagaaccatgagtaaataaatttctcttctttataaattacccagtctatggcattttgttacagcagcacaaacagacttaagacatctatcatttgactatctcattaagtttaggcaagagcataatctcctattatactggcaatggaaatatactgaatcaaagataaaagcaatcatttttaaacattagtattacatgcagtgcaaaaacccaaagtgacggcagtcttacattgccaaagccatcaaaaggggaaggagagggaagaacagcagcataagctgctggcagaggcagggaaagacaagcagaaaggaaagagagaaagagacaaagtcagagagacacaggggaagagacagagagaaaaagagggagtcacagagaaagagagagacaacaaagaagtcaaaaagaaagggagatagaattagtaaagaaaaaagcagtgtaccctattcctttaaaagccagggtaaggttctgtctacccagccaaggtatattcttcttatgtggaatgtctacctatatctgcctccccactaactggaccggcacctgcaccttagtctttccaagttccaacattaacattgccccaggaaatcagaccctatcagtacccctcaaagctcaagtccatcagcacagagccatacaactaatacccctacttaatagggttaggaatggctactgctacaggaaccggaagagccagtttatctacttcattatcctactaccacacactctcaaaggatttttcagacagttttcaagaaataatgaaatctatccttactctacaatcccaaatagactctttagcagcagtgactctccaaaactgccgaggcctagacctcctcactgctgagaaaggaggactctgcaccttcctaggggaagagtgttgtttttacactaatcagccagggatagtacaagatgccacccagcgtttacaggaaaaggcttctgaaatcagacgcctttcaaattcttataccaacctctggagttgggcaacatggcttctcccctttctaggtcccgtggcagccatcttgccgctactcgcctttggaccctatatttttaacctccttgttttgtttcctctagaattgaggccaccaagctacagatggtcttacaaatggaacctcaaatgagttcaactaacaacttctaccgaggacccctggaccgacctgctggcactttcaatggcctagagagctcccctctggaggacactacaactgcagggccccttcaaagcccctatccagcaggaagtagttagagcggtcatcggccaaattcccaacagcagttggggtgtcctgtttagaggggggattgagaggtaacaacgtgctagcagccctcactcactctcagcacctcctcggcctcggtgtccactctggccacgcttgaggagcccttcagcctgccgctgcactgtgggagcccctctctgggctggccaaggccggagccggctccctctgcttgcgggaaggtgtggagggagaagcgtgggcaggaaccaggactgcgcgcagcactcatgggccagcacgagttccgggtgggtgtgggcttgatgggccccgcactcagagtggccagctgatgccgccagccctgggcagtgaagggcttagcacccgggccagcagctgcggaaggggcaccgggtaccccagcactgccggccctcccgcgctgagctcgaattcttgccaggcctcagccacctccccacagggcagggctcaggacctgcagccccccatgccagagccccccccaccaaggtgggctcccgtgcagccggagcctccccaacaggcgctggcccctgctccacggcgtccggtcccataaaccgcccaagggctgaggagtgcaggcgcacagtgcgggactggcaggcagctccacccgtggccctggcatgggattcactaggcgaagccagctgggttcctgtgttgggtggggacttggagaacttttatatctagccaaaggattgtatatgcaccaatcagcactctgtgtctagctcaaggtttgtaaacacaccaaccagcactctgtgtctagctagaggattgtaaatacaccaattagcactctgtctagctcagggattgtaaacgcaccaatcagcaccctatcaaaacagaccaatcagctctctataaaatggaccaatcagttctctgtgaaatgggccaatcagcaggatgtgggtggggtcagataagggaataaaagcaagctgcccaagccagcagtggtaacccgctcggtccccttccacactgtggaagctttgttctttcgctctttgcaataaatgttattgctgctcactctttgggtctgcactgcctttatgagctgtaacactcacctcgaaggtctgcagcttcactcctgaggccagcgagaccatgaacccaccgggaggaatgaacaactccagacacactgctttaagagctgtaacagtcaccgcaacggtctgtagcttcactcctgaagccagcaagaccacgaacccaccagaaggaagaaactccaaacgtgtccgaacatcagagggaacaaactccggacacaccatctttaagaactgtaacactcaccacaagggtccacagcttcattcttaagtcagtgagaccaagaacccaccaattccagacacattaggatatgccttttttttttcagtgacatccaaattctctagcacttcaaaacagtaagcttgttgtatctcatttttgttgtttcctgttcaatgtaagaatttccagccagaaacagtggctcatacctgcaattccagcactttggaaggtcgaggtgaaatgactgcttgaggccaggaattcaaaactagcctgggcaatgtagcaagatcctgtctctacaaaacattttaaaattagccaggcatagtaatgggtgcctgtagtcctagctattgaggaggctgaggcaggagaatcccttgagcccaggagtatgaggttatagtgagctatgactgtgccactgcactccagcctggactacagagcaagaccctgtctcttaaaaaaataaaaaaggaaaaaataattctgtcaaaatttttcctagctctcaatacaaagttttctaaatcttgaggggaggtgaagattctgtatagaatagtctccattttctccaaattcttcctaattttttataatttcaagaataagttacatttcaaattataccacagataatgctaatatggtgataaattatttaatattcttatcatttagagatgcatgctacaagttaagaacatatctaagattaacttcaaaataataaaggatgcagtatatataggggaatatattatgtaagattggccaaggaattaataattgttgaaactgggtgatgaatacatataggttcactttctcaactttgctaaactatgtttaaagttctccctaataaaaagatttttaaagagtaaacaataggtattaaatctaattaaattgttcttagaaataattagacacaaaaaacagtattaattgtaaattatttataacaaaatttagaaggaaattaaatgtccaaacataaaatattaattagttatagaacactcattccatgagataccaagtagccactaaaaatcatgttgcagaaaactcattgatataaaaagaattcacaatatacttctaagagaaaaaaaggcaggttacaaaataatatgtacagaattgaaccattttttaaatgtgagcatctgtgtgtgtatgtgcgtgtttgcatatgtgtgtatttctgccaaatactgacagactttgtttcattcactgctttatccccagcacaaaaaactgtacctggaacataataagaacaatacatacttgttgcaggtaaaggttttagaattccagacaacagggtttcccttggggtatgattctctctacgcttttgtttcatacggtttctcaaataaacattcagttttttctgttattgggggaaaacctttaaaattgtatctcacataacaaaattaaaatttatttgcctgattcaataattacttcatgaaatgcattcaataaaatcatcttatacactgaaaaaagaaaggcctcttctatactttgaatgaataaactggccacggcaatcagaaatagtaaaaacaggccaggcatggtggctcacgcctgtaatcccagcactttgggaggccaaagcaggcagatcacgaggtcaggagatggagaccagcatcctagctaacatggtgaaaccccgtctctactaaaaatacaaaaaattagccgggcatggtaggggacgcctgtagtcccagctactcgggaggctaaggtaggagaatgacatgaacccaggaggcggagcttgcagtgagccaagatcgcgccactgcactccagcctgggcaacagagtgagactctgtttcaaaaaaaaaaaaaaagaaaaaaaaagaaaagaaatagtaaaaacaataacctgttaatcagtcttatccctgtgagtgaattctgctgctgagcaataacataaccttactatctttaggaaactaatacttctaaaatgaatctttaaaacgggtacaaaaaattataaaatcagttttaaaaaattagtccattatattcattcaatacacacttactgaatttgtagacaataagttacctgctagggtaatccaaagaaaattaagttgtagcccttgataaccaagaggctcccaatctagtgggaaagatagatgaataaaagctaaatgaaacataataataaaggtagctgacatttattaggttctttttttggcattgtgctgacacttaacaagcattttctttcttttttttttgagacagagtctcactctgttgcctaggctggagtgcagtggtgcaatcttggctctctgcaacctccgcctcccaggttcaagcaatcctcccaactcagcctcccaagtagctgggattacaggtgtacaccaccacgcctggctaatttttgtatttttagtagagatggggtttcaacattttggtcaggctagtcttgaactcctggcctcaagtgatccgcccacctcggcctcccaaagtgctgggattacaggcgtgagccaccacacctggccaaacaagcattttcttatttaatccctataacaatctttttggtagttactacgatattctcagtttttagataagaaaacgttaagacttaaatgacttcctcagtcacttgagtaataaatggcaaaacagaatcaaaccaaataaaccctgtcccagatacaatatagtgtctctcattattaggatgctagtaaacaccaaagtggactctatcagttccatcagttactatcaagtataacacaatagtcaccttttttaaggtagatatccttttggaagtcttcccaagaatttcttatcttcaactcaactagttatctccactttgaaatacactattacaaccattaacctatgagcctctagagcacaggattcagtagtttctcttctcccagtgctatacaatgtatgcactcaagaaatattaaacagatgaacttttagcttcttttatgcttcctaaattccaaatcactatgccatattacataatagttggtctaggtcaatagcaatttcatttatgttattaggaaaatgtggtatgagagaatcagagaataaaattctgaagtgctaaattatggtggttatgctaatggcggaacactgctgactgtataagatgaaccaagatactcttcctccagggacttcttcctaatcttctaaatgtcctataagccaaattttataagagaactggaaatgtgcaaaactagggggtagttttgtttcttgcaaaaatctggtgataaagatctgagctaaaaatagcgagaatgatgggaaataattcaagagatatttcaaaagcagaatcatttctcactacatgcaagacaaaactcataactaactgcggaacctaagaccttctcagtcatctcatttctgtttcctacagcctagccagagtgaactacttcttaaaggtcctgaattctcacataacattttaaaactcccacaataactgtaatataggccgggcgcggtggctcacgcctgtaatcccagcactttgggaggccgaggcgggcagatcacttgaggtcaggagttccagcctggccaaaatggtgaaaccccgtctccactaaaaatacaaaaattagccaggcatggtggcgggtgcctgtaatcccagctactcgggaggctaaggcaggagaattgcttgaacccaggaggcagagttgcagtgagccaagatcatgccactgcactctagcctgggcgacaagagcaaaactccatctccaaaaaataataataataataataataataactgtaatataaaaagcagatagtgtgcagtcacttgtatgttacataagaaatagacagtagaacacaggaatgggaaaggcattcaaattttgtgttggaaaatgaatgaatgaagataatgcaggagaccttcataactgatttgagaagggactagcagctatctcttcatgatgagataatacaggccctacctctatatcaccattttctcttacaacatgatcttccccttctctctgcctgtcaaaattaaccacctccttaaagacacaatcaaaaattttctctgggaagtttaaagaaatcacctcctcacttctaccactgtccccacccatccacacaagcacacacacatacacaaagaactagtcccactgtctactatggtcccacagcacttggcacctgcctcattgtagtacttagtacagtgattcattattcctttcattattatgtactgtatgagaatatcactagagctagaatatgaattccataaagatatggatcatgtcttatctagcctatttccattaaatacctaccacagaacctcacacactactgtttaaataacatatctaataaataaatgaataaacaaatgaaaacaaatttgctaactcctggagacctaaaggaacctcaaaatgtctgtgacttaaaacatgcctttatgggaaaaaaaaaatatatcttcctatataaacgcttatggctaaccatgacctgcttcaacttaaatcagttttgctaccacagcaataaaaaatacacatatatggctagaagtcgatgcaaaggccaaaagcatccctaccagggctgaaatggccaatggggatattccaaattttatggttgcaaaatgacccaattaatcttagatttcagcaaagtatacatgctaactgaacaaagacaaaagtcactggagctcaagtcattattccaagtgactctaagctgttagtccctgtgttaatggagcctgttaaacaacccagtattagaaaacactggagctcagagggagcatgctaccccatgcacatttcccaagtatcctcacaataaacttctattactgaagataatctatgtacttctctaccttgagtcttaagagacctaagtaacagtaaataatataggaaaccaagcagaggaaagaatcacacaccaaatgtgaactggaaaaagtgacaacgccaattagtaaagattaggtgggctgaacacggtaagattaggtgggctgagcacggtggctcacgcctgtaatcccaacactttgggaggccaaggcaggcggatcacaaggtcaggagatcgaaaccatcctggctaacacagcgaaaccccgtctctactagaaatacaaaaatttagccaggcgtggtggcgggcacctgtagtcccagccacttgggaggctgaggcaggaaaatgccgcaaacccaggaggtagagcttgcagtgagccaagatcgtgccactgcactccagcctgggcgacaagcgagactccgtctcaaaaaaaaaaaaaaaaaaaggattaggtagaaggtgaggattcagttctgaacataatgcctttaaggagacagtaatcaaatatttgggtttttggttttgggggtttctgttttgttttggagacagagtctcattctgttgcccaggctggagtgcaatggcatgatcttggctcactgcaacatctgcctcctgagtccaaacaattcttgtgccccagcctcccgaggagctgggattacagaagcacactaccatgctcggttaattttttgtatttttagtagggatggggtttcgccatgttggccaggctggtctcaaactcctggcctcaagagatccagccacctctggctcccaaagtactgggattacaggtgtgagccactgtacccgaccagtaatcaaatgttatttaggagactggaaatagtgaataagactgagtacaaaaattccaagtctcaaaagtatttgtgggtcatttcaatcaaattgaagccattagagtagataaactcaccaaggaaataactatgcaaaataaataaataaaggaggaaaagatagaaaatgcaaagtcactgtcaattatgcactgtgaagatcagttcataaccgaacataaagcaggcagagaaacagaggcaacaggagaatcaaaatgccagagaaaacttcaagaaacagatatgaggaatgttaagaacagagaaaaagtttctggtcttgccaaaacaataactaatttgcaacctagagtagtttcattaataaacaaggcctgaccatgttggaaggctgaaacagaatacactcgtagaaacagatttttaaactggggggcaaaagtgtgattacaggaataaagtcctaagagctatgaaaagggacatgttcaaaggtcagataaaaggaagaagagaaaaaattgtcgtgtgacagaagcaaaaattatgtagaacaataatcaaatgaaattaagatgaaagtacataaggcagcacctcttcctaacagccactgtatttcaatcttctctaagaagtagcagaaagcatctgtgttaaattatatgaaaacatgagggcaggacaggaaagaaagtgtgaagtgagaggactggagctgtttctgaaaagtctgcaaacaccaaaacacatgaaacagctcagtcagtcataaaaggccttacggcagaaaaaatgaagggactatatttggtcctctttctttattttctctgtttccaaccttggaacagcagtttgcaagtttgtggacaggttgtaacttctgctaaggatgtctcttcagttttgaagagactcaggaaaagttcagaagaaaggagagagctgtttatgattggctaaaggcttttttttattattgtggcagaatatacacaacataaagtttactattttaacatgtacaattcagtgatccatacattcagctcttgtgcaacaattactgttatccatttcccaaactttttcatcatctataatatggtgatctagtaagaaattcctggcacactgcccctaaaacctttggaatttcccgaatgataagggtggaagaattatcttttgctattcataataagtccctttcaaacatatttgagcttatgctaaagagatgactcttggtaggcccctacaaagctgcaggggagtgggtagggaagctggtcacccaagaaatcaatcatgtgattacatagtcagaactttcagccccacctccagggaggggagaaggactagagactgacctaatcaccaatgaccaataatttaatcaatcatgcctacagggtgaagcctccataaaaaccctaaatgatgggactcagagaatttcttctggatcgatgaacacatccacgtgctgaaagagtgatgcaccccaactccatggagacataagctcctgcactggggacccttccagacctcaccctatgtgccttttcatctgtatatcctttataataaactggtaatagtaagtaaagtgtttccctgcattcaatgaatcattgtagccaatgactgaacttgatttgtagccaagtcagaagtaccagaggcctggggcttgcaactggcatctgaagtggtggaagtcttatacaactcagtccttaacctgtggtgtctgacactcactccagggagatagtatcaaaattgaattaaatgctaggacagagaactgagagctgtagggagaaaaccccatgtatttggtgtcagaagtcttataagtgtagaaaaagttttttatcatctccaaccaaaattctatacccattaaataactttccattttccacttccccatagtcccgtgtaaccactattctactttctgtttctatgactttgactattctagtggaatcatacaaatttgtccttttgtgtgtactttgcttcagttagcataatgttttcaaggttcatccatgttgtaacatgtatcagaattttatccctttttaaggctgaataatattccattgtatatatatataccacattttgtttatccattcatccgctggtggacacgtgagttgcttccacctttgggctgttgtacataatgctgctatgaatataggcacacaaatatcttgagaccctgctttcaattcttttgggtattgcattaatccgttctggcgctgctataaagaaatacctgagactcggtaatgcataaagaaaagaggtttaattggctcatggttctgcaggctatacaggaagcatagcagcttctgctctgcttttggggaagcctcaggaagcttccaaccatggtggaaggcaaagggggagtagcacttcacatggccacgtggccagagcaggaggaagagagagagatggggaggtgctacacacttagaaacaaccagatctcgtgagaaccctatcacaagaccagcactgtgggatggtgctaaaccattcatgagaaactgctctcatgatccaatcacctcccaccaggtcccacctccaacactggagattacaatttgacatgagatttgggcagggatacagatccaaagcatatcaggtatatacccagaagtggaattactgagtcacagggtaattctatgtttataatttcttgaggaattgctacactgtttcccacagtgggtgcactatttcactctcctaccagcaatgcacaagggctccaattgctccacatcctcaccaacacctgtgattttctgctgtttttttttttaataatagtcatcctaaagactatgaggtggcatctcattgtagtttccattgcatttccctgattactagtgatgtcaagcatcttttcatgtgcttattggccaatgtatacattttctttggagaaatctctaagttccttgcccactttttatttgggttatttgttttggagaaaagcttttaaagagagacacagaggaaagctttctgtacaatcagatctagctctctagtcaaaaataattggtgatatagtttgcatgtttgtcccctccaaatctcatgttgaaatgtgattcccaatgatggaggtggggcctagtaggaagtgtttgggtcatgggggaggatccttcatgaatggcttggtgttgtccctggcgatgagtgagttctcactctattaattcacaagaaagctggctgtttaaagagcctggcacctcctcttctctcttggtccctctctcttcccatgtgacacacctgctcccccatgccttctgccatgaataaaatcttcctgaagtgtcaccagaaactaagctgatgctgctgccatgcttgtacaacctgcagaaccatgggccaagtaaatctttcttcattaattacccagtctcaggcattcctttatactagcaacacaaaacagactaatacaattggtatctgccctctagatcttttaggaaactaatcatggagaagaggcactggcaagagtgctaacccagcagaagagaaaaaacttccacccctgagaacagagatttctttttcataaagtgccttctacctgatttcagctctgtaactgtcaatctctttttctcttctggcagatttccctatccactagagcataggttttaatgaccacactgctggtagctgtatcactactaatagtagctacttaatgagtcataagtgttactgctatgtgctaggcatgatccttcatctcatatgtgaaatctcatttaaaattaagtcctactaatgatgccgagaagattatcatggttcttacacaaggatgatatgcaaattcattaagtgttccatttaagaaaagaaaaaagaaaaaaaaaaaaaacctcttgtaccctagcagtttcatcttgaatactgttaaaaaaaaaaaaaaatacatctttaaaacacatgaaaggttttcatcctttagtccttcaatgtaacattattaaacgatgtcaaaaagtctcaaagttagcgttaaataacaagcattttctaaattatacattgaggagtctgatcttgaatccacaaaataaaacatcttttctacatcaactacaggaagtacatttttacctcaaactagtaaaatgaaaggttttgttgttgttttttgagacgaagtcttggtctgtcacccaggctggagtgcagtggcactgcagcctccgcctcccaagttcaagcaattctcctgcctcagcctcccaagtagctgggattataggtatgggacaccatacccagctaatttttgtatttgtagtagagacagggtttcaccatgttggccaggctgttctcgaacttctgatctcaagtgatctggccacctcaacctaccaaagtggtgggattacaggggtgagccaccatgcctggccattttttttttcaatcctgctcccttttgccttttaaaagctcaacattttataaatatttagcaaatgtttagctctgaagtaataaagttgatttttcttaaaaaattcaactagaactagaagtgaacatcgtctttttatactcttagaaagttatgtgtttctcatgaaaaaatgttcaccatcactggccatcagagaaatgcaaatcaaaaccacaatgtgataccatctcacaccagtttgaatggcaatcattaaaaagtcaggaaacaacaggtgctggagaggaagtggagaaataagaaaacttttacactgttggtgggactataaactagttcaaccattgtggaagactgtgtggcaattcctcaaggatctagaactagaagtaccatttgacccagccatcccattactgggtatatacccaaaggtttataaatcatgctgctataaagacatgcacacatatgtttactgtggcacaattcacaatagcgaagacttggaaccaacccagatgtccatcaatgacagactggattaagaaaatgtggcacatatacaccatggaatactatgcagccataaaaaagggtgagtttatgtcctttgtagggacatggatgaagctggaaaacaccattctgagcaaactatcacaaggacagaaaagcaaacaccgcatgttctcactcataggtgggaattgaacaatgagaacacttggacactgggtggggaacatcacacaccagggcctgttgtagggtggggggagtgaggagggatagcattaggagatatacctaatgtaaatgacaagttaatgggtgcagcataccaacatggcacatgtatacatatgtaacaaacctgcacgttgtgcacatgtaccctagaacttaaagcacaataaaaaaaaaaaaaagaaagtgatgtgtttcttcaaaagatgctgacgacgtcagacacactttttaaacagtttggaagctgtcttcagagacaaatgctttacaatcaatatttcatttaatcttcacaaaactcaaggagaaggtagtatataacttccattttacgagtaaattcagacagaaaagctaaataacttgcccaccactgcatttcagtaaatggcagagctgagattagagccaacatctatcggactctaaagcaccagctcttaattgcttcactttctatcattgttttgatagcaaaatagatgtaatctgatgatctcatagtgtatttacttttataaaacagtattaaatttatgggggtttaattaattattggcaccataaagacctgaaaccacctaagaaaataaatgctctgcaatagacagaagagcttttttaattatatgaaagtcttgtttttcaactctatcataccatttcctcttaagttgggctctttgcccaaaagtactctaaaattataattttctggcaaggagttttaaaagaagctgaaattttctcttcttccttcacccttggactctaatttttattatctaagaattttctccacttatcataaactggaaagtgatatgatttctttacatttcttgtaacaaacctatacaaaattaacaaacactgcaacatactccctatccctaagacatgttattacattcgctttcttaattactaattactcaaaaatcacaaattcagaaaatatagacaaatttgaaaatgctctaacatattcacgtcctattaaaataaatttgaaaattccctaacatattcatgttctagtaaaataaaaattaaaaataattttattagaaatatggacacctataaggctcatacattttaatccagttcgttgtaagtattctgaaataaccatacctagatttgagaactaaaaaaggcaactgaatctttaattgatttttttcttctttttgagacggagtctcactctgtcgcccaggcaggagtgcagtggcatgatctcagttcactgcaacctccacctcctgggttgaagcaattctgcctcagcctcccgagtagctgggactacaggtatctgccaccatacctggctaattttttttgtatttttagtagagacagggtttcaccatgttggtcaggctggtctcgaactcctgacctcaggtgatccacctgcctcaacctcccaaagttctgggattacagccgtgagccaccgcgcccagcattttttttttttttttttgtcacccaagcgcagtccaagctggaatgaagtggtataattacaagtcactgcagcacaacctcctaggctcaagcaatcctccaacctcagcctcccaagtcactgggacaaaggcatgcgccaccacgcccagctaattttttgtttgttgtagagacagggtctcaccaggtcacccaagctggagtgcagtggtacaatcacagcctgctgcagccacaaccccccaggctcaggcaatccttccacatcagcctcccatgtagatgggactacaagcgtgaaacaccacacctggcaaattttttttatttttagtttactttagtttgagacagggtctcactctgtagcccaggctggggtgcggtggcatgatcatcgctcactggaacctcaacgtcccaggctcaggtgatgctcccacctcagcctcctggctgtgaccacaggtgtgcaccaccatgcccagctaatttttgtatttttttgtagaaaccaggttttgccatgttgcccaggctggtcttgaactcctagactaaagcaatctgcctgcctcggcctcccaggtgctgggattagtgcatgagctactgcacccagcctaaaatctgctcttatcaacagtggtgttatttgtcttggattattttattttctatctttttcatttaaaatgacactaggtcatctgaaatatttagtggtgagaaaaaagtaagactgggtattaggattatagtgggtcaaagagcaaccagagcaaataggaagaacataaagataaaagtctgctctgaatagtctatatcacgtaatttgaatttatatatgcccaatttctgactcaaacttagaaaataaatgtgtagtggagagactatccagagaaaagagctcaaaaccaccagtgtcatcacttttggcagaatatccatagtttgaaagaaaaaatcagttatcctatctatgaataaaatgctattaaaaataacaggatattagttattaggatattagtctccaggttaggatcttgaaatatcatttcttactaagagaaaccacggctttttggagaaatggatgattccagatctaggacaagaagtatacaagatgggccccaaatatcacagcagacaacaaggaaactatcaaaaaccactagggtcatgttatctcctgaagagactcccactaaccaaaggtgagacaatttgcgcttcagtgaaagtgattccaatggattaaatccatcaagtatgtttaaatccatcttctcataatggcatttaaaagaaaaaaaaatggccacctttggagaaagacagggaactaattcgttatcttgaaaacttgtaaataaaaggaaagaatcaaacatttatcctgtctttcctttatcaacagtaccactgggtaactaaacagaagatgaggggaagttactttttataaaaacattccaattaataaatgaaagcaaaatgatgtatttagaatttcattatattgcaacacccactaaccatccacagccgctaacatcacaaaaaagaaagacaattagacattatgatattcccatggtcttgccaaaccccatctatatatatatatatatcacaatgcctaagggatcgaacttgagtctgctccatctctggatccagctgcacgtttgcagaaaatacagaagacaaaggaacatgttgaactgacctatattaagcaatcagcaaaatccaactctgggaaactagtacaaacaacctgggttctccaacaggaaaaggaaaaggatggaggactaaactaaagattaaaagtgacaactcatatcaaaactgctttttgggctgggtgctgtagctcatgcctataatcccaacacttggggaggccaaggcaagaccacttgagcccaggagttcaagaccagcctaagcaacatggcaagaccccatgtctacaaatacacaaattacctgggcatggtggccaatgcctatagtcccagctcctcagaaggctgaggcaggaggatcccttgagcccaggagggtcaggctgtagtgagctgagattgcactactgcactccagcctcagtgacagggcaagatcctgtctcaaaaaacaaacaaacaaacaaacaaacaaaacacaacctagagacagtgtttccctcttgttgcccaggctagagtgcaatggtgcaatctcagctcactgcaacctccacctcctgggttcaagggattctcctgcctcagcctcccgagtagctgggattacaggtgcctgccaccatgcctagctaatttttgtatttttagtagagatggggttttgccatgttggtcaggctggtcttgatctcctgacctcaggtgatctacccacctcggcctcccacagtgctgggattacaggtgtgagccaccgtgtctggccaaaacttactatttcttaatcatcaagactaacctacagtatctagcaatgcacatttgggttattactacacaagtcaggaaaatgattacttatagggaaaggccactgtgatctatttctcaacctgaggggtgattacaaaggtatctgccttataataattcaccaagccatacatgtgttctgtactaatgttttattttgcaataaaaagattttttttaaaatagcaggttaccagcacacctgaacatgtcaacacctaaaaacggctagatatgttttccattctctactctaactgagtgaaaacaataggataaaaatagaaatcaggccgggcatggcggctcatgcctttaatcccagcactttgggaagccgaggtgggtggatcacctgaggtcagtagttcgagaccagacaggccaatatggtgaaaccccatctctactaaaaatacaaaaattagctgggtgtggtggcacacgcccgtagtcccagcggcttgggaggctgaggcaggagaattgcttgaacctataaggcggaggttgcagtgagccaagattgcaccattgcattccagcctgggcgacagagcaagactccatctcaaaaaaaaaaaaaaaatagaaatcagtgtgcatcatttcctccctacccacttcctcttctaaaggaaccacttaatatcacattttaggccaatcagattcactttcttgggattatgaaattccaagaaagagactatagatatccaaacctgttctcccggtctttcctcattccccaagttgtttcaattcaaaacataggagccaggattgattctttttttcccctcattccccacatctagtctatcagcaagtccttcatttataactccaaaatatcgcaaatctctcaacttctatctccactgactctaccatctcaaatcacaaactattcaaatagtttcctaacttgtttctcttttattcttaaccctctacaatctactctacccaaagcagccaaaaggatgttttaaaaacataaactgcttaaaaacctttaatgacagcacacagagctctgacttaaatccaaattcctttccatggccggcatcattgaatccgtgcccatctctctgagctcatctctagccactgtcctcttctccaatccaggcacactggtgtcatttcaattcctcccacacattaagctctttcccacctccaggccttctcatagctttcccccctgcctggaatacttttcccttgctactcacatggataacttctcaatgtcaggttacaacttaaatatcaccttctcagagaagcctctgccaactgccctattaagcaggtttcaccatctttctctacacactacttatatctttcatagctcaagctacaacaagagtgtatgttatatgagggcaaagaacccacctgtttcattcaccaatgagcatctggaatgtggaaaacaattaataattactgaatgtatgaataaatgaggaaatgaatgaagtaaaggccgaatgccaattttgccatgagtagtgatcagtaagtaaagaaagccagttttcagaaagaacagagcaacacaacagagaacaggagactatgtggcttggttccataaacagagtcaagaaaattagctgccaattataaattataaatgtgtgtgtgtgtgtgtgtgtgtgtgtgtgtgtgtatcaagatagcagaaacatctgaaaaatttactcaattcacctctatactaagatgtctggtattatataaatctataaactaattcagaactcaaaataatactacctaaactaattatcattaatgttaacactttgtaattctcattttgctatgagtcatttttcaagatatactcctatgatgtactttcagaaattcaaggtaatcttcatgtcgatattcacggtatgtatgcaaacaatgaattttttttgttgtttttttgagacggagtctctgtcgcccaggctggagttcggtggcgcaatctcggctcactgcaagctccgcctcccaagttcacacgattctcctgcctcagcctcccaagtagctgggactacagatgcccgccaccatgcccggctaattttttgtattttgtttagtagagacagggtttcaccatgttagccaggatggtctcgatctcctgacctcatgatctgcccacctcagcctcccaaagtgctgggattacaggcgtgagccaccgtgcccagcccaatgaacgtttttgagacagggtcttgctctgttgcccaggatggaatgcatccacacaatcatggctcattgcagcctcaatctcctgagctcaagcaattgtcccacctctacctcccatttatgtaaatgtgtgggtctgtactgagtctcagtatcaatgaatttttttttttaaatgttgaaagccagtaatatatgatggcctgaagtgttcctagagtcaactaaagactgagtttctctagttgacatgcaacagaagtttgtttaccggaagtattgcaaattttattgtcgcactccctctctccaagaaggaagagccaactgactattcccatcagcacggcctaaagcaatcctaatcaagttaatgccaccctaaattaaccaagaaaagccaaagggaagacagcagatgctttagggaccaagttgttaattcagagatgctcctgtttggttggttcttttccccttggactaactactttgaatattttgtccacttgcctacctctagaattggaaattttccctagggccttcctctgagtctgctggggtttttttaagagttcttagagttcatcttctcaaagacaactccagctctctatttagtcaatctctctgatatacacacaattttactttccaacattccaaggaaacataaattagaaatatacacataaaatgacatccacccctcttctccctgcaataatatctttgtgatattcctactatctacttaactggtgtgttgctttctctcacccacttccattcataagcgctgagagttatctgctatctctctccattcctaattcctggcctgagatccgggctacagatgctacaagttgatgtgggctcttcatgctgaagaattcatgagtactttctgcttaactcctctatattctcaacccgatccctttgctttttctttccataataatctgttttctgatgggtaatccatccaaacactcatttgcccttatgaaattagtgttttctagctttccatttgcgtgaaggacccctaacatatgacttcaaccttcaattttatttcccccaaactaccctttcacactattaaaaataataataaaaaattgccacagaatccaactatagcttaaattaaagaactcacctgtcttgagagtaagtatgcttcaatagcttattcttttactatccttttagtgttttcattgttcaatgctaacctgccctccaaccataccttaatcaacgaattacacattttaaataactactaacactataacctatttgaggaacaagcctatctggtaaagtgtctcactccagcagtgatattctgtcctctctttgacaagtattaaatatattttcatgctgcccacctgtctatcatagagacccacctcccttctatgaaggttccacctggtgaagagcccatgttttctggtcatttacctttctacctatcaaagctggactattatgtggtcatttttctctcagctagcagttcccctataaaaaatccaataaattcggctgcgcggtaactcaagcctgtaatcccagcactttgggaggccaaggcgggtggatcacgaggtcatgagatcgagaccatcctggctaacacggtaaaaccccatctctactaaaaatacaaaaaagttaacctggtgtggtggcaggcgcctgcagtcccagctactcaggagggtgaggcaggataatggcgtgaacctgggaggcggagctcgcagtgagccgagattgtgccactgcactccagcctgggcaacagagcaagattccacctcaaaaaaaataataaaataataaaataaatccaacaaattccatctaaccaaaatgctaattaatgatcatttaataaaggagtccccaactcctttacagcacaatacagtggaccagtactggtccatggcctgttaggaaccaggcaacacagcaggaggtgagctatacgcgagcattaccgcccttgctctgggctccagctcctgtcagatcatcagtagcattagattctcataggagtgcgaaccctattgtgctgtgcatgcaaggaatctaggttgcacgctccttatgataatctaactattgcctgatgatctgaggtggaagtttcatcctgaaaccatttcgcccccaaccaaaccatctgtgcaaaaattgtttcccacgagactggtccctggtgccaaaatggttggggatctatgatttaatgaatttcccttcccagagggaaatccttttaataacgactttggccagcttgggcaacatggcaagacctcatctctacaaattaaaaaaaaaaaaaattaggtatggtggtgcgtgcttgtggtcccagctaatcagggaggctgaggtgagaggatcacctgagcacagggaggtcaaggctgcagtgagccatgattgtgccactgcactccagccagggcgatagagtaagacccaatctcaaaaaaaaaaaaaaagttaaaaagaaaaaaaaggacttctgaagacctcagtgacaagtatgttaacgaaatctaaggaatctaaaaactactctggtacctcaagttggtgacatgggtgaccacatctattgcctatgtttaacacaaaccttgttaaggagaccaaatcaatgaatatgagggtgagaggtgccttaaaaatcatctaggtctctgagtcatgattcttgaactgggctacacactggaatctccaactcccagaggagaagaagatgcccaaagaagcaaatttcaaagtcagtgacaaggccaggcctaatacccatgcctaacattatgtgttgatatgtgtacatacatacatatatatatacacacacatacatacacacacacacatacacacacacatatatatgtaacatactaaaaatataaaggcatgtatgggaaggacaaatatccaattcatgtcagtgattaccttttgggggatgggaagggagtgtaattgagaagaaatacacatggtggcttcaaatgtattggtaatatttttattaatatttcttaaactggatggtaatacctaagtatctattaaattaggctctgttcttttttctttttgttttgtttttatttttatttttgtttctttgagacagggtctcactttgtcatccaggatagagtgcagtggcacaatcatagctcactgaaacctcccactgctgggctcaagcaatcctcccacctcagccccacaaagtgctgagattacaaggcgtgcaccatcgcagtaggccctcattatcttctggatatctaaaattttgtaataaaatagaataaaaagatggtatataatcaaatgtatatcacattaggaattcagtgaaatatctcaggctagaaagtactcagaaaacatacttgatgaggtaggctttgatggaagaataaaacatagattattcttcaggcaaaaagtaacacaaacttttctaaaggaaaaatgtgaataaaggtaaagctgggagtacccacagcctataacataaataaagaacaacgggggccaggcacggtggttcatgcctgtaatcccagcactttaggtggccgaggcaggtggatcatctgaggtctggagttggagaccagcctggccaacatggcgaaacgttgtctctactaaaacacaaaaatgagctgggcgtggtggcgcccgcctgtaatcccagcctctcaggaggctgagggacgagaatcgcttgaatcaggatgccagaggttgcagtgagccgagattgtacccctccatctcaaaacaaaacaaaatagttttgaaaaccactggactaaagcgtccagctagaaggtactgctgcaattcaaaagtgagggtcataaaaccatggaatgggttttatggggtagtactcttgagaaagaaaacagaaaaaattaatccaccaactttttaatagaaaatttgataggctatagtgacaaactagatgggataatgaaagagtaagacctacctgaaaaaataaaaaatgccaactgagcagcagcttctagtcatacttgaacatcaacgacatcgataaggccatgtaaaagtcagcactaaggaagtgttattcaaggcagaaaagcaaaatggcacttttataaggattaagagcagaataagcaacagagaccaggagattacagaaaaagaggaccactacatcatggaatgataagaaagagagtttcaaaaagagccatcactgtatacaacaagagggtgcacagcctttgtagccaatcagatgcagaattctggcactttctccacttgaccaagttatttaacgtctttgagcctcatataataaggaaaacataagttaacaactaacactgttgaacacataggggcttcaaatatatttgtcaaattttatttcttaagctcagtcgtgatacataaatatttattaaattagtccccattatcttttgttgtttttgttttgtttttgtttttttgagacagggtctcgctctgtcccaagtgctttacatatcacctcatttaatccccacaatacatttcacagatgaagaaattaaacttagaactagcataataagtagcagagccaggattactatttcttaggatttaaataatgtatacttaaatttcctggcaaacaggatgacctcaaaacgagtagctatatttcattattaggagataataatcaataggggcaaaactgccagtaattcctgtcatagccttccatgtggcaaactctctcaacatcctcatctataaattaggattaatgcctataatccaatctactccatagggttgctgtgaggattaaatattatgaatatgaaaattctataaaaaatgttgagacattcaaatatcagggattgctgtcacatatctttcgccttcaaaaatgcttttgcggcatttttgttcactacttcaaaataagactctgaataagctaaaaataagtctgttaaaagtgcaaccaccactttgaaaagtataaatcaccacagaattgctgcctacacctgcccctgactcctccaggttctctaatgtctccacaagggcaaggattctcttacacctataatgaaactctgataacttacagtacagctaatcaatagagagctgcacttcaattcagagttgttcaaactggactactgtgttttctcagaggtgctccttccagttcttccagaaaagaaaaaagtgcccaattctcttatattgtattaaaacggtgcccaatgagtagaatgcaggtaacttacaaaatgctagaaaagaatctatcaattgacttgctcaagtgctctgacagcaggtcccttttggaaactccttcacgaccccccctttttttcacctgaacagatggcttccaggcttcaaggctcacatgtctagtcacacaattcacaatagctcccaaagttcctaacttttcaattatcccatgttcttgaacacacctttcatctaaagatctctagctgtcaaagcatacgaactctttaatcttcacaacagcactatctgagagattactatccttattttataagttaaaaatgaaagactgaggttaaatattttagcaacatcaaacaattcgttaattcattcttggggagagaggaatacatattatgaacttctgtcaatggacaacctagatttggcttcctaagatcattgcaaatattagctcaaacacatcccactcttgtatgcatacatttccaacacaggtgtcaaagattaaatataaactattaataacagtaaataccataccaaagcagcactatttttacacgcaaaactatattgggggagggggttctaatttaaacttcccactgtcttgcatccataaatacttttgaacttgagggggaagggggaagaacacctgtcagagcagcacatccacaatgttttacagactgtgtagctattaatatttaattcctcccgccccgggaggtcaggccgcagggagcccggcgctgcccacccgactttccacgcgccaggcctgccggccgcaggggaggctccggctcccgctcccctcaggtcccctcgcccgtggacagacgcggcgggacactcggacccgcctcccgacctcagcgcgcccggctcggggcccggcgggcggggagaggctcgcagcagggcctggcctagccacccccgccccgcggccgccggcgccgcttccctccttcttcccgctccccgattcgttacctcttaggcgccggcggctgctccatggcggccggggacagagagagggacctggtggacggcgaaggccgaaaggaggaaaggagccggggcaccggccggccgagcctagggcaccacagagggaaactctgggaactcggaccaactttcccgtaactccgcggcggatctccctcccgcttaggagcgcggctcctcccgccccgccccgcccccggccgccccgccccgcccccggccgccccgccccgcccccggccgccccgccccgcccccggccgccccgccccgcccccggccgccccgccccgcccccggccgccccgccccgcccccggccgccccgccccgcccccggccgcgccggccgccagcctgcggcggcggcccagagaaggtggacggagccgggcaccgcggcggggggcggagcctgccgcggcctgggttggcgggcggggccggtgccgcggcgggtgggcggggccggggacgaaggcctggctggccccagagccccgtgaccgggaaaaggagaaggttccgctagagctagggggcgaggccggagccgctctaggctggggaagggcaagtccctctgagctggcccagagctccgcccctagcctgccctcactacggtttgccctgatccaatttgactcatttctttggctttcccaacgacacatcctaacatcgtgtgaatccgtttgaagtattactttctcactgcccacgcttccctctctagttctgtttataattatcggttatgttttcccccagccatttgacatgtgtaggccacagtactagggatacttctggaaattcttgtttgatttttattgtggacaagctcctcgctacatttcacaataattacatctaattaccgagaaaataattcgtacagtgagatctctcggtacaccaaattcagttgcactgggcccttgcagctgtcccattgggtaacctggcaagcctgtcacaaattatgctgccaggaagaatactcaagaaaagtttgtttcctcccctctttggtcctctcccccaacctgattccagcagccctcatcccattgtaatctgaccactgcatgcatccatattgtgggtatacttttaaccttaaattccatatatacctttcacataacaatatacagctgctacatgagtttacttgtttttgtcagaaattgtcaagatgggccgggcgcggtggctcacgcctgtaatcccaatactttgggaggccaaggcgggcggatcacttgagctcaggagttcaagaccagcctggccaacatggtgaaacctcgtctctactaaaaatacaaaagttagccgggcctggtgatgcgcctgtactcccagctgcttgggaggctgaggcaagagaatcacttgaacccgggaggcagaggttgcttttaaccttaaattccatatatacctttcacataacaatatacagctgctacatgagtttacttgtttttgtcagaaattgtcaagatgggccgggcgcggtggctcacgcctgtaatcccaatactttgggaggccaaggcgggcggatcacttgagctcaggagttcaagaccagcctggccaacatggtgaaacctcgtctctactaaaaatacaaaagttagccgggcctggtgatgcgcctgtactcccagctgcttgggaggctgaggcaagagaatcacttgaacccgggaggcagaggttgcagtgatccgagatcgcgccactgcactccagcctgggtgacagagcagaccttgtctcaaaaaagaaaaagaaagaaagaaattgtcaagatgtagagttacatagaattttcttggaggttagaacaataaatatgaagagaatgttaaataaaggaaaccaatttgaagagaatgttgaataatgtgaatatttgcccaaattaaacttgactattagcagctaatacaagtttagtttagtcctctttttgcattattttaagtttcactatgtaataaacttacactattttcaaaccattatattctttcctaaatttagttattttaagaccattcatttttgaaactctaattctgagaacaagaaaaagggttttttttgttttgtttttttgagacaggttctcactgttccccaggctggagtgcagtggtgtgatcatgcctcactgcagcctcaacctcccgggctcaagcaatcttcccacctctgcctcccaagtagctaggactacaatgcccggctacaaaattttatacttgtttgcatttattaaagatccacagtctgactgttcagaaataacaggacaacaacaattttaaaacctaaatatttaaaatgttaaagctgagaagaatctttgaaattactccactctaacccccccaactctcatcttcacttccatgccatactcccagctttttttttttttctttcactcttgttgcccaggcttgagtgcaatgccgtgatctcaggtcactgcaacctctgcctccctggttcaagagattatcctgcctcagcctccctaatagctgggattacaggcacccgccaccacgcccagctaatttttcgtgtttttagtagagacagggtttcactatgttggccaagctggtcttgaactcgtgacctcgggcaatccacccacctcagccacccaaagtgctgtgattacaggcatgagccactatgccaggctcactcccatctttttgtgtttcatcagagaaacctcttgaggaaggctgggcgaggtggctcacaccttcaaccccaacactttgggaatccaaggcaggcagatagcttgagcccatgagttcgagaccagcctgggaaacatggtgaaacccatctctacaaaaaaaaaaaaaaaaaaaaaaaaaaaacaaaagaaatagctgggcatggtggcatgcacctgtagtcccaactactaggcttcagtgagccatgatcaagccactgcactccagcctgagcaatagagtgagaccctgtttcaaaagaaagaaaagaaagaaagaaagagagagagagggagggagggaggaaggaaggaaagagagaaagaaagaaagaaaataaatgatccctgaattgttttaccaacagcaatctccagggagcctttcccagtcaaaccaccagcatcatcacccactatctgtcacatttaagttgtgatagagatactgtcttgtatatatgtccgtagtaccctgtgttggcttttgtatgaaacttgtcacactatattgaagttctgtttattaggctgtcatcccaacccaactatgagttgattgaaagttgagccatatctttattctctataccttgcatagcaagtgcctgataaatcgtaagggcactgggctggatagcatccttttggtcctgcagattcattctccatccttttccatctgctctctgctctgagagctaatatgtatggctgacatcagaagccccttggcttatggttgggtctgatgatagacccagcaagagatcatctgagggagaaaggagggtgaggtcagactattggatgccctggttcccttcctgtgaggtgacctagggctagctgtgttccagagaatcatggctctttgcaaggcaaactactctacctaattattcctccttccccttgaccctttgggcctgagtatcatggctgctctgctattccctgggtttcttctctatgtcctatgttcccctaacctcaatcctcaactgatgctttgtaaattaaactcttttcaattgacactaatttgattgcaccttctaaagggcttatgatcttgactgatacacccataaagaattgtggaagtaggaggaatactatcagaaaataaatttctgaggtctttcctcaacttgaaaagggagaagactaataattatcatacgactccaataggatcagacactaggcctccattttctcattaaaccctgaaaacaaccttgtgaagtagttatttccattttataggtgagaaaactgaggttcaaaagtgtgaaaggagttaccctaggataaacagaatgtctgtgttctaatccaggcctttaagactccaaagctggaacttattccactgtagatcagtcaacaaatatttattgagcacttaagtatgccaggcactgttctaggtgctggatattcatcagtaaagaaaagagacaaatagacaaaaatccctgccttcaggggatttacattctggttggggaaacataataagataaaaaagtacctaatgggtcatgttagagattgaaaactggtaaggaagaaaagtgaaatggaaaaagggaatataaagtggaggggaagaggccggacgtggtggctcatgcctataatcccagcactttgggaggccaaggtgggcggatcacttgaggtcagcagtttgagaccagcttggccaacatggtgaaaccccgtctctactaaaaaaatacaaaaattagctgggtgtggtggtgggcacctgtagtcccagctactcaggaggtcaaggcaggagaatgcgtgaacctgggaggcagaggttgcagtgagccaagattgcgccactgcaccccagcctggacaacagagcaaaactctgcctcaaaaaaataaaaagtaaataaaaataaagtggaggggaagggatgaaattcaggtaggatggcaaaggaaggcctcaacgagagagtgactaaggaagtggaggccagagccatgcagatagcatgaatgtgaggccaagggaatgttagaatgtgaggccaagggaacaataagtgctaaggcccagaggcaggactgtgcctggtgtgttgtgtgttactcaataaaggaattgtttttctcctgaattacttagaagaagaaaaaaaaatgcttcaagcttctgttttactttgtctgttgaaaaccaacctgaagattccaggaagaaagcatagaagtcaccattcaaactgcaaataagaggcagcagcattcatgaacaaaggaaagctgcaggaacatttgagatacaggtaagggtcacccagcttcacttaactgtgaaagtaaggtaatcggccaggcgcggtggctcacgcctgtaatcccagcaccttgggaggccgaggcgggcagatcacgaggtcaggagatcgagaccatcctggctaacaaggtgaaaccccatttctactaaaaatacaaaaaattagccaggcgtggtggtgggcacctgtactcccagctactcgggaggctgaggcaggagaatggcgtgaacccgggaggcgaagcttgcagtgagccgagatagtgccactgcactccagcctgggcgacagagcaagactctgtctcaaaaaaaaaaaaaaaaaaaaaaggaaagtaaggtaatctgtttctgcttccaacagctccatttggaatcgagattaaatatacactttaattatactagcaaacagctgattacaattctcagttgagtgctctaagagaaatgggaaagaaatctgcaatttgagatccagtgcctttgaataacaaaaagcatacgttctttgtaactgaatacgtacaccaccatgtttaaaatattaagatagaaacatattaaggtaaaaatttttccttgtcatactagttgcagctattcattgaaactacaactttgtatttctcttaggctggagtgtagtgacacaatcaaagcccactacaaccttgaactcctaggctcaaggaatcctcctgcctcagcctcccaagtagccgggactataggcatccaccaccatgcccagctaagtttacttttgagttttgtagaaacagaggtctcactatgttacccagactggtctcgaactcctggtctcaagcaatcctcccaccttagcctcccatagtgctgggattataggtatgagccgccatggccagcctcatttttatatttgttggaaaaataatatcaattaacaaatgttaattaatcttttctgctataataaggaacagtttggggaagagagaaatcactaatcaaatatattgtgtaggtttttatttgcaggaaaatttggaaatgttttccttcaagaggtaactttacaaaacattttctcttgatctgtttctcttttctaacttagttttatagttagtttgaaactagcatgttgcatttgaatttaaccactgtcctcctttatcataacaatcttaaactattatttaacttgtttctcagaccacactgtgaacctcttgggaataaggacagtatcttcttcctatttgtcatgtcaggagtctagcataactattagctacaagtaacaactcaaaatgatttttaaaacaagaagactagaaggaggtgtttctaggtttgaataattcttcaatttacttccatttcttgttgttgatttaagaatcacaaggttcataaatttggagtggagagctttatttgttgtaaaaggttgcagcctgcaggctggccatcccacaatctgggaagcatagcctctgtcagaaaccggaagcaggcattttaaagaaggaagaatgagacggattggctaagtgtacatattcaataggttatagtgcctccttttcgtgaaaaaaaaaaaatatatatatatatatagatatctatatatatattcacaaaggcagacactcacatgcacaataagcaaacatgcatattatatatgtcccatgttcactttggggtggagatttaacatttacatgcattaaaattaagctatatacttcaaaaggtgaaaccgaagacacagaggcatcctgtgtgcatcctctgtaaatcagccacaaccaatccatggtggtcacttaccagaaaggaatgctggtcagttgtattgtcaaaaccacaaaaaaaggagtccagcaagtctttcaaaaggaatagttcctgtttaactcaggaaagaaagtctaaaggcaattagcaagggaagaagtataatgaggtatgtctgaccgcctatcctgtcatggctgggaatttagtttttaaggtttctctggggtccccttggccaagggggggtccattcagttggctgcggggcctaggatttaatttctatttctcactgctctgctgtgcacagcagacctagttgtctcctcaaactatctccctcccctcagaggacaaatatggccaccaatgttccaggccttacatggagacatgacaatgcccagcaccagaagataattagttatttctgaatacaacttttataagatggtaggaaaagtctattccagaagcccctctgcagacttccctacatgtcctattggctagaaatgtgtcacagacatgttgatgaaaaatgccaaactgtgtaaaatatttgaagaggtttattctgagccaaatgtaaggacaatgacctcaggaggtcctgagaatacgtgcccaaggtggttgggttacgcttgattttacacactttagagagacagaaactacaggcaaaaccataaatcaatatacataaagtttatattggtgtggcctggaaaggcttctcaaagttggggggtgcagggggagggttccaggtcataggaggatccaaagattttctgattgacaattggttgaaagagttaagttttgcctaaagagttcaaatcagcagaaagaaagtcttgtagttaaaataaggggggttatgggagccaaggttcatgttatgtagatggagcctccaggtagctgacttcaaagggaatagatggtaaatgtctcttatcagatatttaccagttaaatctctcctggatcaggaaaagatatggaaagggaagaggattctctagagaaagtaaatttttcccacaagagacagctttgcagggccattccaaaatatctcaaagaaatatatttgggggtaaaaatactttgatttcctttagggcctgttatttgtcatgtgatgtgaccagaggcagtttggagttggtatcttattgctataaagagtctgttctgtcaatctgaggattgctattttaatgttaacactggtcagttgtgcctaaactctacttccttcataacctgaactagtttttcaggtttctttggaatcccttggccaaaagcgggtccatttagtcagttgaggggggttagattttatttttggtttatagccccatctctgacaaagaaaaggggataaccaaaacctgttacgaccatttgtgattcaccccatggaggtgggtttagagttgaggctgggactagacttccctgaagtttatggcaaagagaaccatgcagagaagaactgagaaaaaaaaaacctttatctgagggatgtgaatctttaaaaattatcaagcccattgagacagcaatcacattctactcccctgcaaccacctgtttagctatgtattcatctcttaaaactgcttgctattgccacaagtagctataagtgtacctaataatgtagcaccagacaccataagccacactttatagttgaacaatgtatagcaaatcaatagcttatgttattttaatatacattcttggcaatggaactgcctcttctttccctttaaaattctacttataactgctgctaactggagtgcatattcatggcaacttgaatctgtgctcccaggctgcaatcttccaacttgacccaaataaactctctacttatattaattttgtctccacttcttcctttaggtcaacagaacaaaattggaatccgattatgtagaaaaaatggggaaattgtaattagacaacagactacaatgtctgctacacataagtactcagaacgttataatcaattaatacatgtttgttggataaatgaatggatttccaagcaaagaaaacataaggaggctaggaggtccaagatcaagggcctggcagattcagtgtctggtgaaggccaacttcctgattcatagacagccattttcccccgtgtcttcacatggtagaagaggtaaacagcttcctcagacctcttttgtaagggactaattccattcatgagggtagcccttatgacttaatcacctccagatgccatcaccttcaggggtaagatataaggaatttaaagagacaccgtaattcataaactatatattttgtcaaccttaaatgatgagattcagaaaatatgattaagtatagagtttactccagcccaaagcttgagaatgaccttctgatgaatagcagttacaagtggggtgtaaggaaaaaagaagaggcaattcctaaattgttaccaggaatttacattgaaataacataagctcttgattggctattcattttttgtttgtatcacaaagttcaggaacataaagatagtgggtgaggcagctagacaggaacaaaatgcttttacacagttgcccctgggcatgggttggaagaggcatgactgaagttccatactcatgactctctgggcctaagagagtcattttgcatacctcacatagctcagactactctgagctatttttcttttctcataagagaaaatgagtatgccatttgtgattttgtttcttctcaactctagattgatccttcattgcctgctctgttaaaatagagctaggtcctttaagtaatttttctttaccagatggcatgatggtaaactttgtcagtggacagcactggagagacattgcaaaagaaaaaggtttccttcctggtgggcatatgttccctctgcaggctcctgcacccagggctgcttttctgggtcctactaaatgggcaacttcaacattgtccagccaggtcctgcaacacatgtaccttcatcagcctttggttcctgcagtgcagagcagcaacagcacccagtggccaacagtttccttcccaccacaccccactcctccctcaggcaattttgctaccgagtgcccgcattgagacacctcaccatgaacagctttcccagaaacctaagaggaagatttctgcaaagttccagaaggaagatttccagcaagttctgtcagcatggcactacagtaacttctctgccattcagtgagacacagctgtgtcctcttcaacaaggtctggatctcaatcctggggggcctcttccttggatgctctagctcagccccagggaggagtagctgttattcctgttgtcttagtcagttcaggctgctataacaaaacatcataaactgttggcttataaacaagagaaatttgctgggcatggtggttcacgcctgtaaccccagcactttgggaggccaaggtgggcagatcacctgaagtcaggagttcgagaccagcctgcccaacatggtgaaaccctgtctctacctaagatacaaaaattagccgggcgcagtggtgggcgcctgtaattccagctacttgggaggctgaggcaggagaatcacttgaacccaggaggcagaggttgcagtgagctgagatcgcactattgcactccagcctgggcaacagagtaagactctgtctcaacagaaaaaaaaaaacccacaagagaaatttatttctcacagttctggaggctgggaggtccaagatcaaaggtctggcagattcagtgcctggtgagggccaacttcctgattcatagacagccatctttccccgtgtcttcacatggtagaagaggtaaacagcttcctcagacctcttttgtaagggacaaattccattaatgagggtagccctcatgacttaatcacctcccaagtccccatctccaaagtcaccaccttcagggttaggatttcaacatatgaattttggaggaaaataaacattcaaacaatagcacctatattctttagaggtgtctttgcttcttactagccaatcccttgttactccagtcctcagttatagttaataattctttatattaaacttttcctgttcaaataactgtggtctctatctcttgtggtttctgtatcagattggaccttgactgagacagagagtaatagcaaagaatcccaggccccactataaactcagaaaaatgatttagataagatcagattgatttcactttcagttcaacacataattatctacatcagcagatctcaaacttttctgtctcggtaccattttacacttttaaaaactatggagaagcttaaagagcttttgtttatgtggattatatttatcaatattaagaaattaaaactgagaaaattttaaaacacaagatacataagcacacatttcattaggcatcagatcaatgatatcattacatatccatgtggcatctggaaaactccatcatacactcatgaaagaaggagactgaaaaaggcaaataatatttaaaccttgtttttaaatagttttgaccttgtggaccccttgaaatggtctcagatacccccggaggtacctggatcacactttaagaactattgatctaaactaactttatataaacacaataactaagacctatgaagggaaaatatagaaaatatggcccttgccctctcagaactgcttagttgaagatatagagtatatattcatgaaagagtaaaataacaattcaattctgtatgtaataaactatcagtaagttctatcattcagaaaagtgctgtagttcaggctgataacaggctggagctcagcaaaaaaaaaaaaaaaagaaagaaagaaaaaaatggctttcattttataaaattcaccctccttatacagtagttacaaggagaaaaaacgtttcctttatgtacaaacctaagttccagaacaagctgaagatctctcaaaacacagcaatgattggctaagacactaaacacagccacagagctaaggaagagaaaagaaccaacactaagaatctgaaagactccataagatgaagccctttcatagtgagtctttagttacattgatataaggaaacttgtccaggtatggtgactcacatctgtaatcccagagctttgggaggcccagacgggaggatcccttgaggccaggagttcaagactagcctgggcaacatagtgtagacccccatctctaccaaaaaaatgtaaaagtcaactgggcatggtggcacacacctgtagtcctagctacttgagaagctgacatggaaggatcacttgagcccaggagtttgaggctgcagtgagctatgattgcaccactccactccagcctgggtgacagagcaagaccctgtctaaaaataagtaaattagtcttggtgtggtggctcacacctataatcccagcactttgggaggccaaggtgggtggatcacttgaggttaggagtttgagaccaacctggtcaacagggtgaaaccgtgtctctactaaaaatacaaaaaaaaaaaaaaaaaaaaaagtcagatgtggtagggcacacctttagtacgagctactcgagagactgaggcagaagaatcgcttgaaccctagaggcagaggttgcagtgggccaagatcatgccattgccctccaacctaggtgacaaaatgagactccatcaaaattaattagttaaaaaatatataagaaacctaaactctataaactaatgtttcttgctttaatcatttttctttatatatttttgatctttcaatttctttttattcctgcctgtggcctctatgaataatttctaatgtgtcttgactgaactaagcagaaagaagacttgtttacttctaggcgaggagagttagggaagtaagaatacccctagataaatgtgtactggtggcatcagttaatgctgttggaaaacagggcaatgaggcctagagcaggagcgaaaaaagaggagaggtagatgcttagtagacagagagaagctgcagtaaactcagctgccctaaggccagtctgagcatgtgatacattcaaagtaagctcaaattcaattgcaaaaagtttggaaagatgaaaatttttactaaaaatctcacagaagtgccgagggaggaattgtatgcatattaacacagcaaaacttcccaaaaatcctctttaccggtctttttccctaaagttttcctgaaaacctgcccaaataacttctccaaataacttcaccaaactctcaaggttattccattttctcatactcacccttctctccctccccgcaatcccgcccccaccctaccatcgaggccgtttaccttccttggctattacttcaagacctttcccccaacacacaaaataataatttaaccttcttctttgtttttgttttgtttgtttgttttgtgtgtgtgtgtgtgtgtgtgtgtgtgtgcgcttgtggcttttttgtttgtttgatttttgggggggggcggtttgagacaaggtctcactctgtcacccaggctggagtccagtggtgtgatttcggctcactgcagcctcaaattcccaggctcaggtaatcctcttgcctcagcctccggagtagctgggactacaggtgtgcatcactaggcctgacgaatttttacaattttttgtagcaccagggattcccactatgttgcccaggctggtcttgaactcctgggctcaagcaatcctcctgcctcggcctcccaagtggtaggactacagcatgaaccaccatgcccagactaacctcttccttaactcaacatagatggagagataagaaatgaaggatccttccttcagtgggtgggagaagtaaagggagaaagactgaatattcaaactttaatatttttgttcctttcaaacattctttttaccaacatttattcattaagttgccagacacagataatgaagtgtggtccctaacctgacactatggaatatccatccccattacaatcttctttttgctctttctttggaattcctttccaaagggagtgattcccttacaaaaggtaattttttgcttaataaagtgattattttacaaaaaattatccatggaatacttttacgtggttaatttccctcaggtatttaaactacgatttcaatctcagtctttaggagaaagagggtaagatgactgtggcttctaaaatttcctttgaaacaaagtcaaagatattaggaaagttatctcaggggcaccttgcgaataaatcatcatccaagggttttgagtaactcaaaagtaaaaaaaatagatttttctgccatataatcagttgttataaaataccgtcgacaaagaactgttgaattatctctttatatttagccacaaataaggggagaaagtaatagagaagggtctgaacaccacagatttatgcttagtaaatggaaattattttgaaaaaaataaagagtaagggcattaaaaatataggctgggtgccgtggctaacacctgtaatcccagcactttgagaagctgaggcaggtggttcacttgaggccaggagttcaagaccagcctggccaacatggtgaaaccccgtctctactgaaaatacaaaaaattagctgggcatagtggtgcatatcagtaatccagccactcaggaggctgaggcacgagaatcacttgaacccagtaggtggagtttgcagtgagccaagaacgcaccactccactgcactccagcctgggcaacagagtgagactctggttaaaaaaaaaaaaaaaaaaaaagaccagcctcggcaacatggtgaaaccctttctctacaaaaaatacaaaaattacctgggtgtggtggcacctgtctgtagtctcagctactcaggagactaaggcaggaggatctcttgagccctggaggtggaggctgcagtgagcatgatcacaccactgcactccagcctggggcaacagagtgacaacctgtctcaagaaaaaaatgtatatatatatatatatatatatatatatatatatatatatatatacacacacatacgttttatatatatttatatacacacacataacttattaattcctatctgtattaattgcctattgccgaatatcaaattatccccaaatgtaaccatttaacatttattacctcctagtctctgtaagtcagaaatccaggtgcaacttatcaggacccttcagttcagggcctctcaaaaggctgcagttgaggcaccagccctgtgtctctcccaaggctttagtcaaggtgatggccagggccatagtcacctcaagatttaactgggacaggatccacttccaagctcattcaggtgtttttggcaagattcagttcctcatgggtgctgaactcaagacttctgttccttactaccagttggcctttgagaggcccctcaggtcccagccatgtggccgtctctagagggcagcactcagcatagaggctggcttcatccaagtgaacaagtggagagaagacaagagagcaagcaaaatggaagtcacagtcttttgcaacctaatcagagaagtggcatcctattatttttttctctgttctatcaggtagaaacaaatcactatgtccagcccacactcaaagagagaggattacacagagcttgagtaccaagagataacttttgggagggagggatatgttcattgtcttgattgtggtgatggcttcacaaatgtgtatataaatcaaaacttatcaaacaattgatgtacaataaactgcacttgaattatgtacagtttattgtatgtcaattatatctccacaaagctgtttcaaaaataaagcattattttatctgtgtgcaaaactgaggttctttaaagcaggaactatttcaataattctaccatttcaccttaagaactctaaaaaaagaaaaaaaaagtacagggtctagcatggtggctcatgcctgtaaccccatggctttgggaggctgaagtgagaggattgtttgagcccaggggttggagattacagtgacctccactgcaccccagtctgggcaaaaaagagagacctggtctcaaaaaaaaaaaaaaaaaaaaatttaaaaatgtaaaaaataaaaataaaaagtttggacttgacagttctatggaaaatggaaaaagatgaaaataataatagtaataaaaaatacaaggttgtctactgcagactataagaaaaataggacttcaacaatcaggaaagacaaagtatctttctaatccagtggctctaactttagtatgcattaaaatcacttggagaatctgcatttctaagttttcaggaaatgttgatgctgctggtccagagaccatactttcagaatcagtgttctagttcatcagcaataatcaactagaaattgggaaagaaaaagatagcattcacaaatataacaagctccataaaatacatagaaataatccaaaagaaaactatataaaacctatatgaattttaaaaaaaatagtgaagggcatgcaagaagctctgaataaaagatataccatgttcctaaatgagacgatgcaatatttaaaatttttaaattctccttgaattaatatataaatttagttaactgcaattttttaaagtctcaaaaggaccttttacagaatttaacaagttaattctcaagttaaaatggaaaaggaaatacataaaaagagccaatgaggttttgaaaaaatgagcaattaagagagacttgtcctagcaggtggcaaaacatggaataaaaccatggaaattggccagccttacacctataatcccaacactttgggaggctgaggcaggcagaccgttagaactcaggagtctgaaaacagcctgggcaacatggggaaatcaagtctctacaaaaaaatgcaaaaaattagctgggcgtggtggcatgcgcctgtagtcccagatactcaggaaactgaggtgggaggatcacttgagcctgggaggttgaggctgcagtgagccttgatcacaccattgcactccagtctgggtaacagagtgagatcctgtctcaaaaacaaaacaaaacaatggaaattaaaacagtgtggtattggctgggcacagtggctcatgcctgtaatctcagcacttggtaggccgaggcaggtggattgtttgagctcaggagtttgagaccagcctgggcaacatggtgaaacctccctgtctctgtcaaaaatacaaaaaaaattagctaggcatggtccttagctaattagcacgtctgtggtcccagctactcaggaggctaaggtgggaagattgcttgcgcctgggacgtggaggctgcagtagccaagatcatgctaccatgtactccagcctgggtaatggagtaagactccctaaaaataaataaataaataaagtggtattaacttagatatagataaattaatatatataatatataataaataataagcccagaacataaccatttttatctggaaatgttgtttatgataaagtgacattttacatcacagagaacagatcactcaataaattaggatgaaacaggtgactttttggaatacataaaataaagttagatctctgtttctataactctgcatcagttaggcttctttatattgcaagcaattgatgatccagcccaaactgccttactcaacaaagggcccatttaactgaaagaccctgaaatagagcaattccaaatttaggatttgctttgagttggtggctcagtactgacatgaaagacattggagtttttgtttattcacttgttttatgttttctttttctgcctcttcattctgacataggcagtgtcagctgcttcctaagacttcaatggctgccgaatttgccaagctccaaatcttacacaaaactgccccaaaggagaaaaatactatcttttggtagctcctttatataagaaggagaaacctcctcttccagaatgcttccacaacctcttcttgtcattggctcaaactgtcggcttgaccattccctagcaggcaatgatttagtttacgcctgaaacaacaactggcttatctgaataaatctttgtggaaagagggatggaagccgtgcctggtggctcacgcctgtaatcccagcactttgggaggctgaggcgggtggatcacttgaggttagaagttcaagaacagcctggccaacatggcaaaaccccgtctctactacaaagacaaaaatttgccgggcgtgatggtgcatgcctgtaatcccagctactccagcgctttgggaggccgagtgggagtatcgcttgagcccaggagttcaagtccagcatagccaacaaaatgggactgcgtctcttagaaaaatgaattaattaagccaggtgcagtggcacattcgtcctagctactcaggaggctgtggtgggagaatcacttaaacccaggagttcaaggctatggttgtgccactgcactccagcctgggcgacagaacagaccctgtctctaaaataaaataaaatttaaaaaggcattttgtttagcaagtaaaaaattgtgagccactatgcccagtcctaccttttttattttaaaattataaaacagccatgggcttcaaggagaccaaactccttcccattacatgagaagaaatcttaattagactatgtccaaatctaaataatttcattatctttgcaataattggttcagctatgggaatatgatgtcattctagccaataagatgagaagaaaggaaatagaagagaacacagcctgcaagggggctgacagtatcccaacacagcttggttttgtgtgtgtgtgtttttgttttttttgagacagggattggctctgttgcccaagcagaagtgccttggtgcaatctcggttcactgtaacctctacctcttgggctcaagccatcctcccacctcagcctccccagtagctgggattacaggcccgcaccatcatgctcagctaatttttgtactttttgtagagatggggtttcaccatgttggccaggctggtctccaactcctgagctcaaggtatcctcctgcctcagcctccagagtgctgggattacaggtgtgagccactgtgcccggcccaaacacagtcttaaagaatgtcaatgattattgctagcatgatcagatggttattccaactgcagctgttcttctaaatatgcactggggcaaaatgctacagcttcagtcactggtatacagctttggagctaggaagtgttttttctactttccaataagcaaagtacaccagaagcactttgctttcacgtgacaaaaactgacaatggttggagcagagcatcccagtggcaatgacttgagattgtcacttagttccttctggatccctggacttgctctggttcttatcctctctgagaccctattctatagtttttgcctcgattctatggctacatcatggccctctaataactttctttttttacttagagttcatttctgttacttgcaagaaccctactagctataccgacttatttttttaaaccacgtatttatttcactgagtttttgttttgcattcagttttataatatatttatcaattttatgtcttatgtgcttacttgattttgttacatgtcagcagttcttttctaccacaacttcctcattcttaaattcttaagttttgacgagtctctcaatgtaatagagctcatctttaagaaacttttcagacagaacacatagatggtctaattctgagatcttttataactgagaatgccattcttttgacatcacacatgacagcactcccaccctcagtttctatgggtattgctttattgttttatggtatttggtgttactcagaagcctgaggccaatctgatatttttccgctgaaagtaaccatttttccacgttcatatacttggaagttttctcatatgttttcttattatttctgcttcctttgttatttttacctttataagttctacacagttagtctggactcttgcagttgctaatgacagaaaatcaacttcaaattgatcagcattcaattgtgggcaaaagaattcattgaagccagtttaagcagagagatacttactaaagtgtattaacttgctgcagaatgattggaagacttgtagcaggaggctggactttcaggaactcctggagctacattgaaatctacctcagcaaagttgctgctaccactgccgctgcaccactactgacttaaagaccaggctgcctttaagccatggtcaagaaagttgccagagtaggaagttgctgttgtcactgctggttgcacagagctaggaactgacaagacatcagagcttctgacagctgctgcaaaagcaccaaaatgcctctgccactgtgctgctggaatagccacctcataggacccataaccctcttccaaatctcattcagatgcatctatgtgatggatgctacatcccatgcagaaatcctcactgcaaaggtctatgggtaatgtagacttccatcttccagcctctgatgtacacgaagtctcattagtatggggttggagcagtattgagtgaaccaattgatagtgtctgccacactcactagaataaaacaaatttgttcacccatgtccctgggaaggccaaggaatagagctgactctagaaacaaatggaagcaaaagttcaaaccatgacacaggcattctttctctcttcctatttttcagttctgattttattcatttaactaacatttattaagcaactactatgttccagacactgttctaagtgctgggatgccgcagtgaacaaaacatacataagtctttgcccccttggtcctgttttctgggagagctttgttttctggcagattatttgaaaatggcagcaaaactagttcccagtagctccaagcgtataggttacttagtgcttgaaatatcacaagaagaaaggtttttcctcccccaaagccctataaattccacacaataaaaagattctaattggttttattatatgatgtatccaagaccaatcaggtattgaggggcatgtaccatatgtccactggatgtggagagactgttcccaaacacaaaaggtgctgaaaccacaaagatagagttgatgtccgtttcattcctaaactattcaggatcctacacacacacacacacacacacacacacacattttcatatactttaaaaagtgcccccccatgacaatgcaaatttttcttccacaaatgaaaacacactctctttctccccaaaagaagaaacctcaaaactcatctagtcaccatattgtgctctaaagtcccagaattttaggtctagatatgactcttcatttaataaccaatggataaattaaaaatataggctgggcacagtggcgagtacctgtagtcccagctactcaggaggctgaggtgggaaaactgcttgaagccaagagtttgaggttgcagcacgctatgattgcatctgtgaatagccactgtgctctggcctgaatactcagttttgcaatatatgaggtgaatcagaagaccacaacaaaacctcttatttgaaaactgagagccaatttccagtggccaccattctatagcatatacctgtgctgctaaaagaaaaagtaaggagtctgccctagcagtagggtgaatcttgcactgtcaactccatgagctagtaaccaaagccaaagatctgccaggtcctgaattttgaacccgaacccacagcccaatggctttttctctttgccacagaccttgatgctgtgcccatacgcctcgctcttggtttaactgtattgttcctggctgtgtcccaacaccccaagatccagtagtctttctcagaccacatcccagtggttgtctttagtagcagaattactgtcacctttgtagtgctgagaagtaacagcaggaggtgtctggaggaggcctgggggtcaagcttctaccacagccaggatctttttccctctttttttaaaaaaaaggtttttttttgtttgtttgtttttacttttaaaaatatttcttcctaattatgtgcttacttaaccccagccagttttatcttctgcaattcccacctgcctaccttacctctcactaactttagctccaggttcaagtagggaatagagtccttagacttctccaaatgcacatgatcagctgcttcttagttatcctacaggtatctcagatatcttgctggttacagacagaaagggcctctccacagagctatatgtcattccccttcagcatgctgtttattcagcatgctgtttaggttaaagccttcttgtttaaaaaaacagttgtatagagatataatttccatgccgcacaattcactcatttaaagtgtaaagttcaatgactttttaatatcttcacatagttgtgcatccctcaccataatccattttagaacatttttatcactccaaagaaacctagcactcacctctcaattccctcatccctcccagtccctggcaactactaatctactttttttttcttttttttttttgagacagagtttcgctcttgttgcccaggctggagtacaatggtgacttctcagtgctccctgcaacctccgctttctgggttcaagtgattctcccacctgagcctctcaagttgctgggattacaggtatgcgccaccatgcctggctaattttgtatttttagtagagatggggcttctccgtgttggtaaggctggtctcgaactcctgacctcaggtgatccgcctgcctcggcctttcaaagtgctgggattacaggtgtgagccacacatctactttccgtctctacagatttacctattctggacatttcatatgaatggaatcatataaaatgtggtgctttgtgactggcttctttcatttagcataacattgtcaaggttcatccttgtggtagcatatatcagaacttctccttttattgctggataatattcctttgtgtggatgtactacattttcctcaaccattcattagttggtggacatttggttgtttcttactcttggctattatgataatattgctgtaaacattcatgtacaagctttgatgtggacatgtgtttgcatttcttgtggaatacctaggagtggaattgctgagccatatgccaatagcatgtttaactgcttgatgaaggctgtaattttcttgaaattattaaaagcagccaggcacagtggttcaagcctgtaatcctagcactttgggaggccgagacaggcagatcacgaggtcaggagttcgagaccatcctggctaacacggtgaaaccccgtctctactaaaaatacaaaaaattagctgggcgtggtggctggcacctgtagtcccagctactcaggaggctgaggcaggagaatggcgtgaacccaagaggcggagcttgcagtgagccgagatcacgccactgcactacagcctgggtgacagagtgagactccatctcaaaaaaaaaaaaaaaaaagaaattcttaaaagcataaaaaatcatcaacttattccaatatctgtatattttctacaagtcactaaagcactagctatagaaggcacatgatcagatttctcaaatataacatgtgtggttaccctataatccaagtgttcagttcttagatggggacagaagaatccttattcccacttacatacctcaactcacccagttcttcatgttagggcctaagacttgctgcactccacttctagttaccaatatttatcttatgattgcaagtaaaccaaacagttaggtctcacataactgagaagtttgggagacctgacttcagatatagatggatgcaagggttcaaactgaatagagacagatgccagctttctacttttcagcaatcctttttctgctttggcttaattctcaggtgagcttgctctgcttgacaacaaaagtgctcttagaagctcataatttcagataccaaaagagatccgtatcaatctcttcataaattgctaactggccctccttggaggtgggggtggggattatttttactccttgttcaatttccaggtccaaaggaatagggtggtcagcctgggttacaggcccattcctgtggcaggaatcagggggtcaaatgattgctatacacactaggtatggcatgagaggttactgaaaggaaaatatgcctgcaaaacagaaaagaaacaactgttcaacactttctgtatctattattcaatctcataattttcatttttatctctttatcacttttatgggtttcctatgaaatgtttctcaaatttgccctatacatcatttattcggttttctgcaaggtgaagtctataattcaccttccgcactttggtttctgtgtagatttaaaaaaatgatttacgtatttattatttatttaattaatttttttagagatggagtctatgttgctcaggctgtagtgcaatggctattcacagggacaatcatagcacactacagctttgaactcctggactcaagcaatcctccctcctcagcttcctaagtagctgggactacagtcaacatgccactacacttgtatttaaatgtttactgtgagtctcctctgctctgggtattgggctgggacaaggaccctgtcttcagagagattactgtctaatggaggaggaagccaagaagcagaaaattacaataagatgatatgattaaggtaagctcatggggcttacaagcgcacagcacagacatccaacccagcttgggggtagtcagaggtttcctaaaggaggtgacatctttcaagaatgagtattgattacacagggaatgagggccaaagaaggaagggaatttcgggtgttggagcagtatgtacgaaggcatgaagatgtaaaagggcctgtcatgaaagaggaacaccagtgatttcagtgtgactgcgacgtgcagtgcgtggtgggcagcaagaatgaggctggtgaggagcacaggggccgggtcatcaaccacacctgtgtgcctgggggttcagagtttaacctggggcagtggaagggtttaaacaggagagtgtcatgatcagagccgcattttagaaaggcagctccagggcccttcagaatcaagaagattgtccaagagattactgcagccacaatggtgagagagggtgaggaactcaattatgaaagtgtggcaggtgtgtaaccttcacatgcccagctccttcttgtgattaagtcagaagctcacctggcatctcctaggagattttctctgctctcctagaaagtgatcttcatatagctaaaacctcctcacctttaagcatctgagctcaatgctcacattgagatgtcacatctcaaagaggccttcaccattctagggaagcaacacccccaaccatcagcactgacttaagtataatttccatgaggacagggagtcatctatcttactgttctctgtactccagagcccaaacagagtaggagcttaagagcatgtgtttagtgggtgaatgtcgaatgaactgaagccattctcatcttcaggcaatgtgcggaagttcctcgagcccacgctagtatagagaaaggctcttgtggcaaggtcatggttgaaaagacagaggttgcagagtcagaggggccttcagatatgaccattctctgagcatcttatcttgccttctgtgttactacagctctactggcctgaagtgtgttccttaatgtaatcaacaattagctctaaggagtatgaaactgcatttttgtcaaaaactatcttcctcaactacacggaaaaatccatttttagagtgaagaaacatgaggttaaaaaaagaagaagagaaggagaagacagagaaggatgaggaaaggagggtgaggaggaatagaaaaaggaggggtagggcatggtggcttatgcctataatcccaacactgtggaaggtagaggcaggagaatcgcttgaggccaggagtttgagaccagcctagtccacatatcaggcttttaaattttttttgaagataccttgtctttacaaaaacatttttttaaacagtcaggcatggtggtgcaaacctgtagttctagctacttagctagaggctaaggtgtgaggatctcttgagcccagaggttcgaggctgtagtgagctatgattgtatcactgtactccagccttggaaacagagtgaaatctgctcttaaataataaataaataaatgaaaaagaaaaagaaagaagaaggcagagccaagagacagaaagacaagagaatgatgtatagcattcagctacatctcttagactttgcaattctatgaactaacaagttgcctttggagctaagctaattttctttttttttttttgtaacagagttttgctcttgttgcccaggttggagtgcaatggcgtgatcttggctcactgcaacctccgcctcccaggttcaagcaattctgtctcagcctcccgagcagctgggattacaggtgcccacaccatgcctggctaatttttgcatttttagtagaggtggggtttcaccatgttgtccaggctggtctcaaactcctgacctcaggtgatccactcaccctggcctaccaaagtgctgggattacaggggtgagccactgtgcccagcctggagctaagctaatttacactggctttggggactttcaagtaaaaacaccctgacccagttaataataaatcaaataatcaatctatccctatacctatctactaatatgttcttcaaggacatagttgacaattcactcttctgatttaatttcctttatcttttctactctcatcttttccttgagatttaaaaaaaagccagagggtggaaaaaactttgcaggggcaattctcacagtttatttttgtgtttctctcaaatctccttacatgtttatgtaagatactactgtgggtctcatgttatccacagaatcttaaaagggattattagcatagctgtggctttctccctttaaaataaaccccatgttacttggaatttgtattcctcaagggaccattttttccagatacacatcatactaaatactttaatcaaatgtgtaatcaaaaatattttccattttacttcttttattcatttaatggatttatgttacccattctttttggaagataattaacttggaataaaggctcagcttttatattccaaaatatgaaaaaaaatttcttctttctgggacatataaaatgtcaatctaattgtgcattgtttggtatagtcatgtgtagttctaaggaatatgaaattatatatatattaatattaaattaatttttcctagggtatcactctcacgcttaaaagaatttggtatagggtatgacttgagcaggttgtatagatctttttagggctctcacattatttcaattatcactaattgaaatacctaattatttcattacctaatattgtcagataggtcccacatatctgtatctttgagtcccatggcaccaagctcaggagtggttcctgccttcaacacagttcagaaaaggtcttggattgaggcagaagttggttcagtaccagggagtgagctctgttcttactgctggtctctggtctgtctgcctaagccttggtctgtgttttcttctattgctgttttccttcccctgctttgcacacctcctcgttcttactttccctctgggtctagtttcccactggctctattttatggctggtcctgacttctctgctaatgcacattctggcttctattgctccatgggttgctgacccctgactgctttttaatccatccaggtcttgcatctagccacactcatttgtgctccacaatgctagtgctgattcatcacatctgtcaacacttagagataatgaagtggggaagctcagacagaatcaggaaccaaaagaaagatacaaactactgaaactgactccagaagaaatagaaagtctgaatagaactatatgtcagaaagatgaattaggaattagtaatgaataattagtttgtaattttttataatgctcataaagaaagacccaggcccacatgttatccccactgaattctaccaaacattccatgaggaataccaatttttcacaaactcttccaaaaatagaagaggcaggaacacttcccaaatcattctgtgagatcaatattacctagatatcaaaatcacaccaacataccacaagaaaactatagaccaatatctcttatgaatatgaatgtaactaggcaagaaaaagaaataaaagacattgagattggaaaggaagaagtaaaactatatttatttatttatttatttatttttgagatggaggcttgttctgtcacccaggctggagtgcaatggcatgatctcggctcactgcaacctctgcctcccgggttcaagtgatcctcctgcctcagcctcctaagtagctgggattacaggtgcccaccacaatgtccagctaatttttatatttttaatagagatggggtttcaccatgttggccaggctgatctcgaactcctgacctcaagtgatctgcccaactctgcctcccaaaatgccgagattacaggcatgagccaccatgccgggcctaaaactatttttaaagatgatgtaatctcgtatatagaaaatccttagaaatccactaaaaaattacagttaacaaatgaattcagcaatgctgcaggatacaagattaatatacaaaaattaattgtatttttatatacttgcaatgatcatttaaaaataaaattataaaaaactcatttacaataaatttaacaaaaaaagcacaaaacttatactctgaaaactaaaaacgttctgtaaagaaattaaagaagatctaaataaatgaataaaatgtcccatgttcatggatcaaaagacttaacattgttaacatgttactactctccaaaactgggcacggtggctcacacctgtaatcctagcaatttaggaggccaaggtgggcagatcactttgaggtcaagagtttgagactagcctggcaaatatggcgaaaccccgtctctactaaaaatacaaaaattagccaggcgtggtggtgtgcacctgtaatcccagctgctggggaggctgaggcacaagaatcacttggacctggtaggcggagattgcagtgagctgagattacgccactgcattccagcctgggtgacagagtgagacgctgtctcaaaacaacaacaacaacaacaacaacaaaatgttaatactctccaaactgatctatagattcaatgcaattccaatatcatctcacctgacagctttgaacaaatctacaagctgattcttaaattcatatagagttcaagggatccagagtagccaaaacaattttgaaaaagaagaataaagtaggaagactcatacttcccaatttcaaaacttactacaaagcaacagtaatcaagacagtgtggtgcaggcacaaggacagacatatggatcagagagtctagaaataaatttatatatctatggccaatcaactgatttttgacaaaagaaccaagatcattcaatggggaaagaatgtcttttcaataaatggtgctgagacactggatagccacatgcaaaagaatgaagctggacccttacctcccactatttttaaaaattaactcaaaattggttagtgacataatagaagagcaaaaactataaactattagaggaaaatataggggtatattttcatgaccttggattcagccatagcttcttagatatgataacaaaagcaagagcaacacaagaaaaaatagatatattagacattgtcaacattaagaacttttgtgttgaggggcttgtatctagactatataaaggaggctttcaggctgggcacagtgactcacatctctcacatctgtaatctcaccactttgggaggttgaggtgggaggattatttgagatcaggagtctgagacaagcttggccaaaatgatgaaaccccatctctattgaaaatacaaaaattaggccgggcatggtggttcacgcctgtaatcccagcactttgggaggccgaggtgggtggatcacctgaggtcaggagttcgagaccagcctggccaacgtggcaaaactccgtctctactaaaagtacaaaaattagctgggcattgtggcaggtgcctctaatcccagctactcaagaggctgagggaggagaagtttgaacccaggaggcggaggttgcagtgggccgagatcacaccactgcactccaacttgggcgaaaagagagagactccatctcaaaaaaaaaaaaaaaaaaaaaaggccatgcagtaatggcaggtgcctgtaatcccacagctactcaggaggctgaggtctcaacctgggaggtggaggttgctgtgagctgagatcatgtcattgcactccagcctgggtgacagagtgagtgagactccatctcaaaaaaaaaaaaaaagagttctttcaacttaataataaaaagccaaataacacaattttaaaatgagcaaatgtctgaatagatgtttaccaagaaagagatacaaataaatggccaataagcacatgaaaaaatggttgacatcattagtcatcaaggagacgcaaactgaagccacagtgagataccatttcacacagtaggatggctagaataaaaaagtcaaatagcaattaagtgttagcgaagacgtggaaaaattagaactctcacacactactagtgggaatgtaaaatggcacaaccactttggaagacagtctgggtgctcctcaaactattaaacataagattaccataagacccagtgatttcactattaggtatatgcccaagagaaataaaaacatctgtccacacagacacttgtattcaaatgtttgtagcagcattattataagagccaaaaggtggaaacaacccaatgtccatcaactaatgaacagataaatgaaatgtggtacatctatgtaattaaatgttactgggccataaaacagaacaaagtactgatatactgccataacatagatgaaccttgaaaacattacagtaagggaaaggaaccagtcacaaaagactacataccataggattccatttatataaaagtccggaatagagaaatctataaagaaaaaacctggattaatagttgcttagggcaggggaggacagggggaagacagtgagagagcagatagctaaagaatagggggtttcttctcgagatgatgaacatgttctaaaattgactatggtaatgcacatatttgtgaacgtactaaaggccaccgaatcacacactttaaagggtgaattttatggtatgtgaattatatctcaataaagctgttaaaaacaaacaaacaataaccaaatccacccaagggttgtatttgatgacttttcagaacattaaaaagctttgaacatctagtgcagattcctgaaagtttagcttcatggatctgtttattttgcaattaatgaaggttaaaggagcattctccagcctctcgaaaactgttacttgggagcttagaatttctagttatgaatctatgcacaagaacagcacctgtcatgtctttcaaaggaaaatgtatttgccttattaacaaatcaagagtactaagtttctatcaaaagagcagaataaaaaaaagattaaatggcttatttgctcattgtttagagaagtatgctagtgaataataggtttaaacttctgtaagagttactagcatttcaagttcttaaaaaaggaataatgcattaaagtccatttaaaacttctaaaagtgacatcaatgaccataaaatagaagctgaatgagtatttcaagttaaaattatttactagaccaactactggctataagcaattaaactaaatacagaattattgagatggggataagaagaaaataaaaatgtaaatcattttattacaggattaaaaaaagctgatgaaagagctgtaacaatattttgataggaggagaataacagaatcagttagaagcaaaactggagaaaggagaaaaggaaaagaaaagcctgtgtgaaatatttaactgggtgttgaaaaatatgataattttgataggctcactttttaaaactaattttctcacatgtttaccaatggctggatgtgcaaatggacaacaattttttatcttgtaataaaatgaattttaaaaatataaggtagggccaggcacagtggctcatgcctgtaatcccagtccttgggaggccgaggtgagcagatcacttgagatcaggagttcgagaccagcctggccaacatgacgaaacccagtgtctactaaaaatacaaaaattagccggatgtggtggcatgcacctatagtcccagctacagtatatacatacatacgtatatatatatatatatatatatatatatatatagagagagagagagagagagagagagagagagagagacagagagagagtatatagtatatatacataactcctgacctcgtgatccacctaccttggcctcccaaagtgctaggattacaggcgtgagtcaccacatccatccggtaatttttttttaaactctctcttgtacctgtatcttatgtttaaccgaaaaaggttgaaaattgagttgctagacttaatcattattttccctggctgaagggatagtgggaggggtcaagcctctaaaagggagatatctgggccaggcgccgtgactcacacctgtaatcccagcactttgggaggccaaggcgggtggatcaaaaggtcaagcgatcaagaccatcctggccaacatggtgaaatcctgtctctactaaaaatacaaaaattagctgggcgtggtggtgcatgcctgtagtcccagctacttgggaggctgaggcaggagaattgcttgaacccaggaagcggaggttgcagtgagccgagataatgccactgcactccagcctggtgacagagcaagacagcaagactccatctaaaaaaaaaaaaaaaaaaagcaatctctgcacactggcagcaatgtgaataaataaaaggactaaggattactgaatatttgtcagttaaagaaaagccaactcagtgtctataagaataaatcattcttgactattctttcagaaggaaagcaaatttacagagaaaggggagaaataatgaatttatttgatttttggaaaaatctttgaaaaattttcacaccaatagctattccttagttgagttagcctagggtttcactatgagaaaagaattaacatcaaggtagtagggcagagacattattaaatggagaagtgtaaattgtggtatttcctgaggaagcaattctgggtcagtccaatttaatggtttattatgttttggaaaagacagtaaaatctctacatttgaaaatgatactacatttttatggggagtgagatgtcaaaatgacaaggataaactaggcaaagcgaaaacagcagacaattttggcctatatataagttaacaagcacattagtgggaaaatcatccaagctctagttatacatggatttgattgctgagtcacaatggggcacaggaatctaggcgtcactgaggctgctttttaaagataccccaatgatctgttgacatttaaaaaatcagcacaaggttattggaaacaaggcaactgacattgttgattttcctatccatgaacaacatagctcttatgactcctctcagcacatttggctccgagacccagaagcatgaatagaaggagctggccatccagggcatgcttttctaccctgtgcaatcatatcacacagcatgaccatgcttatgtataaggacagaatgtgtgttggccacatcactggtaagaacccagacagcatttcttgggctctgatagtcaccagaaaatggaaggacgtttattgagaagttacaacgtgaaaggcactctgctgggtttaggaaggatatgtagataaattagacagtgtgcttacctacttgagctccaagcctactcagagaaataaaactattgcaatatggaggagttggtaattatgctgagaggtgtggttgtgggtgttcagaggaaagcgaaaccaaattctgtcatttattcatgttagttcaactaacatgtattgagtaccactattcattcatgtattaatcaatatttatttactactatgtgcgagccacttttctaggtgctgggatgtagcggtgaaaaagacaaggtccctgttctcatgaagttaagacagattatttttaaaggatcaaaatagatgtgataacatgaaatagataagtgctatgaagaaaacaaaacaaatggatgtgatggagtggctggaggttggtggttcctttatatggaatcagaacaagtctcccagagaggtgacgtctgatacctgttgattagaaggagcctgctgtgggaagacgcccaagaagagctttctaggcagagggaacagcaagtgtgaaggccctaaggtgggaaggagcttggtgtgcttgaaaatcagaagaaagaccagttatagctcagcaagcctggagaagccagacagacaaggctggaagaagaccttgttcttccttttgtggatccctcaaccctcatagcccaacagaaaaaaagaacatgtcagtaagtacatgataacgcgcagattgcacagatttacaaaggagatcaattttttttaaatgtgaaacaggagtgaaagatcataggttatgaattatattttcagaaagaactaggagcataatgctgaggaagagggactatggacactatggaccagcatacgacaaacacacaaaaatctggacacggggtggatgcggtggctcatgcctgtcatcccaacactttaggaggccgaggtgggcagacaccttgagtccaggagttcgagaacagcttgagcaacatggtgaaaccccatccctacaataaaataaaataaaaaattagccaggtgtggtggtgcatgcttgtagtcctggctactggggaggctgagttgggaggattgcttgaacccaggaggtggaggttgcagtgagccaagatcacaccactacactccagcctgggggacagagcaagactctatcccaaaagaaaaagaaaaaatctggacactaggctaagaataagctgtaccgtgggagcagaagcagctgcagaagtgggcaaagagggtactgtccagggctgggacaggggctgcaaggctaagctccttacactacagggtttgaatgatccctaaaaggtcaatcaaatccatcttcttttccaccagaaacctctcaggactcactctggggaggtgaaacactttacatgtcattaacatgtcacgtcttgcaatgtattcttagggctttgtttctttggattttttttttttttttttttttttttttacagagtctctgtcgcccaggctggggtgcagtggtgctatctcggctcactgcaatctccgcctcccaggttcaagcaattctcctgcctcaggctcctgagtagctgggactacaggcgcacgccaccatgcccggctaattttttgtattttagtagagacggggtttcacagtgttgcccaggctggtctcgaactcctgagcttgggcaatccgcccaccttggtctcccaaagtgctgggattacaggcgtgagccaccatgccaggacccatttatttggatatttagtcttcaagaggtctctgttacgagagaatggcagcaccttggtatgaactttaaatgcaattatagtccctccatctttataacaaggcaagagatagtaatgaggcacttgcagcttttgaatcagaacagagtaaagagattgctttaaggaggcagcattcacagccttgtgaaccaggtacactgttcatggacttgcctcattgtggaacctagagaaaatttattatttgaagtcccagtttcctcatctgaaagaatgtcagcctgagagatttgttacagagatttaattggataatttaaatgaaagtgcctgccagattcagtaaatgtgcaggggtcttttttcccactcaaacctgtggccccaattcacccaaatccttgaggcccactctgggtggggaatagggagtccacagaccctaaggagaaagggcagaaagaagatgagatcattaggagaagctggtactacttacgaggcattgaattgaggaaagatgtgtgaaaaatgaaatttatcttcattccaaaaaggattctgagaagagaaactctggaacttctggagtaatgcattttctcccttcttaatgcaggaagctaacacagacattggtttcaagggtgttaaaatataatagggctaaaatcatttattgccaagattttgataacaaaatccaaacataagaactagcaaccccacttgcaagaatttaaaccaagttaagctcaaatcaatgcacagtatatccaacacgggaaaacattttttacactgcctgacctgggattccagcaaacaatcttcagctatgtaaattcataggcccttttaataccatgttagtctaggttcacatcaattgtttcttgccaggaaaatgggtttttcatttggagatggctcaatgccagaccgaacaggactttttagagacattggaactctcaaatatcaccagtcacagtcaatgcaatttcaagctcatgcgattttagttcatgcaatcatttgaagaactgagaaggcagaaaggagggcgctggtatcagagggattgcaaaatctattgaaatggcatctactgaagaaggagtcaggtgacctatgtgaggctcttagttctattaataaaccaaggtaggacttaattggatgaagtgacagatgtctagtatttttcattcttaaggtacacacaacaggttcaaaccagcctagtagagattcaggcattcacttggtggattggccaatttagtctgaggcaaggaggcactcccaaacataccagactccttggaaatatgttaagtggtactgatgatggccagggctgccaaggatgtcaaatgtatttaaaagtgagtggagcccaagcctgctgccctctgggtggagacatggtcgatttcaggaggatatggttccttttttatggtgtgagcaggaggtccccagccaaggatcttacctgacacagacaacatcaagataatatgaagtatgatagagatgcagctcttgtctttgtgaaaatagtgagactggtgttatcattgataagagcagcatttgcctttttgttttattttctttgtttaattttcttttaggaagggcagtacaacattgagctgaaggcagactatcagctagattccctggatttcaacactggctctcccactggctaaatgaatgatattaggcaagtcacttaaccttcatgtacctcagtttccccatatataatagagataacagtagcatctacctcaaagatttactttgaggaattcataaacacacacatgctcacacacacacacaccacacaaactgtttagagcacgcctagcatgtggtaattaataaagttggttattatatttctgtgtggttgattaaaaaataatacatatttgctataaaacaaccagtatacaaaaaaattttaaatgaaaacaacccattaccatccatattctcactatccacaggcaatggcaacattttgggaaagaagtacaaggtagaaacaaccatttaactatgtaatatttattctttccttcttccttattaaccacaccttgattttgttgtgggtagcaaactatattttccagccttccttgcaaataagatcaggcatgtgactaatttatggcaaatggaagttgttgggtggggcttctaggaaagctccttaaaaaaagtctgaatcaggacgggcgcggtggctcacgcctgtaatcccagcactttgggaggccgaggcaggcagatcacgaggtcaggagatggagaccatcctggctaacacagtgaaaccccgtctctactaaaaatacaaaaaaaaattagccgggtgtggtggcgggtgcctgtagtcccagctactccggaggctgaggcaggagaatggcatgaatcgggaggcggagcttgcagtgagcctagattgcaccactgcactccagcctgggcgacagagcgagactccttctcaaaaaaaaaaaaaaaaaaaaaaaaaaagtctcaatcagctggattttattccattttgtcatcaatcttcctccttcctactgtctaaaacatgggagtgatggctgaagtttcagcaatcaacttgtaaacctgagtataaaaagcacaccatggggatggtggaatacaaaacaagaacgactaagtctctaaggacattatagaacagctgtatgcaccaggaactgcttgctatcttctggatctttcatttggtgagagaaaatctcttcttgttgaagccactagctattggtaatgtctgttttcatataactaaactagattcctgagtacttccattgtctctaccttgtattaaatcctctgtttcccaaaccacatggtttcctttttcttggttgattcccctgtgttggtgtagcatatcccaggtaacttcatgagaaatgtacatcacaggcaaactttttgagatttaagagtttaggtaaaatacttgtttatctgctacatcaaaggtcagaataacagtagcttaaataagatagaagtttgtatctgtcacataacactctgaacataagggcccaaggctaatacggtaaactctggcctattctattactactttcatcttcaacaagcagctttttgtggtccatattggctgcttccactccttctattacagctacatttcagtcagaaagaaagaagaggtagaaaaagcaatctcctttctctttaggacatgggccagaacttgcacatatcacttcagctctcatcccactttacagaacccagccacatggtcacacctagatgacaggaaggatcagaaatacagtcttttgcagggcaaccaatagaagccatacagcatttattactgtagaagaagaggccaggcgtggtggctcacacctgtaatcccagtgctttagaaagccaaagtgggaggaccacttgagaccaggagttcaggaccagacagggcaacatagtaagacctgtctctacaaaaactttcttaacaattaggtgagtgtagcagacccagtttgaaaccaggttaattttgccagagcttgtgtttcttcccctatacctctcagcctcccaacataagcaatccaaaatggccatatagtttatgccatatagtttactacttttttttttaaagatagggtctcactctgttgcctaggctggagtgcaatggcatgatatcactgcagcctcaacctcctgggcttaagcaatcctcctgcctcagcctcccaagtagctagaactacaggtgttcaccaccacacccagctaatctttaaaaatatttttagagatggtgtctcactgtgttgcccaggctggtctttgtcctcccaccttattcccccaaagcactaggattataggcatgagacaccatgtccagcctagtttgctatttttaaagcacaggtcatttctcaggggtactctctaataaagttatacgacgtgcctttaaaatagcagtaggccaatgccattggctgtggagtatcattatggacatcaaagtccatctaagtctatattacgttgcaacacagtggagtatcaaagccccgttagtgccctgcagtggtcactgtgtgaaatagcccactaggttttctgcaaggcctgtcgcctgcccacagggcaacacatggggctgccccagactgtttcttcctcctggccacacagtcctgcagtctggagtgggcagaggctctgcaagcaacattcctgggatgcaggaccatgtgccccgttgctgtatgttgctgcctgcacactgtggctgctgctttcttccctatctacaccctacagtttttagaccatcatgctcagatctctcaggcatgttgctgatggagcagaaattccaaattttgttaagttctcaaagcacctcctgttgagagagtgtgtctagtttttgaattccacctatttggaatctgcaaactgagtgttcattttgcagggtcagtagtggccttacatcatcaacaataaacattcgctgaaagcctcttatgtctagggctgtgggcagctacctatgtagtgtaattggatctcctctagaatcaggctctcaccctgtgactgcttaatgtagtctaggaggttatgaagccctcaacccagctgaatagagacattaattgacccatgactaaccagcttttgataagatgcttccctgtggcaagatgtggggctgctaaatttcgttgagacataggtagtccaaggcacaagcactctggggtggtgaggcattgcagtaggaagaatacaaggtgagtaggaacgctggaaagagtttattgaatacgtaccgtgtgtcagatgttctctatacattagctgctgtaagtcaggctccccaggaaacagattctgaaatggaggtctgaatgtagaggttcattgggaagtgatctcagcaccagtgcctgagaggactgaagtaaacaggattgggcagaggaaaaagtggaagaatagcacagctgcaatagaggtttcaaccaatcctcctaccggtagctggtccttcagaggtgtcctaagtggaagggagtgggccttcttgccctttctacacacaattgataagtcatcagatgccagatgcccctggggaggggcagaattttggacttaataccttcagctgaaggcaacttctggaagaggctcagttgtgaactgttaacaggtaactctcttgacaggaggggagggaggggaagagtgccttgatcctgaaagggtgatctgggcagcacaccacgacatccactacattatattatttcatccacaggacatcctatgaagttgtcattataattaccattttaaaatggggaaactggcctggcgcagtggttcatgtctataatcctagcacgttgggaggctaggtgggtagattgcttgagcccaggagttggagaccagcctgggcaacatggtgaaaccctgcctctacaaaaaatacaaaaattagttgggcgtggtggcgcatgcctgtaatcccagccatggcaggctggggcaagaggatcacttgagcctgggaggcggaggttccagtgagccgagatcgcgcccctgcgttccagcctgggtgataggagtgaaaccctgtctcgaaaaaataatttttttaaaaggggaaactgaggcttgggatgtttatctaacttgtctaggctcacatagctgggttagattgactaaaacctccatatgctttctactacactaccctgcctcagaaaggaaaaaataaggcagggagggcatggaaaaaaaaaaagctggagacagcttcacccactgcacaattttgtcagaaatggatcagaagatgcagattacagagtggttatgagcacagtctctggagctaccctaactggtttgtatctcagcttcattgcttaccaaccttcggcaagaatttaacctctccatgccccagttttctcatttgtgaaatggagataataacagtacatgcctcacagggttattacaaagcttaaatgaaagaataaatgcagcacatgccagggcctaggacagtgccaggcctataataagcccctggtaaactttagctactattataacattcccatttatggtaactcttttgacagcacaggaaatactctctttaggggctctgctgagacttgcctaacatttcaaagaatgatgcctgtctctgagcaccacacacagcctcatcaccagtgaaggctctggatgttccatggatctgaataattttaaaaacccagcttttaggtggtcagggtgactcctgaaatacgaaagggaacaagtgccaaccacacctacacctccaatgtataatcctggaggcagaataaataaaagaaaactttaaaaaaacagctccttattgtctgccaaacaaaataccttttactgaagtcaactttttagaaatcttggacagtgcatgagtggaagctattcaattctcaaagaagtctcagttgagttttgtaatccaaatcccacagccgaaggagaaagatcattaaccttattgctgcaatttcaccaccacttcccctggatagcaacactcagggagttaaaccctcagtgcatgtttcttaggtgtgtggcccatttgttactgtgtatcccccagccccgctggagccactcagtgggttctgccacagctcagttctgccacagctcagttctgcctaccatgtagccatgtgataaaaggacttggaaatttaaatcaatcactcctttaaaaaataattcttaagaagaaaatcatttaaccaagcatagtgggttaaattgtggcctccaaaaagatgtatccatttggaacctgtgaatgtgaacttatttagaaaaagggacctagtgcagtggctcgtgcctgtaaatcccagcattttaggaggccgacgccggcggatggcttgagctcaggagttcgagaccagcctgggcagcatagtgagaccttgtctctactaaaaataaaaaataaaaaaaaatagccagctgtggtggcgcatgcctgtggtcccagctactcgagaggctgaggtgggaggatagcttgagcctgggaggtcaagcctgtagtgagctatgatcatgccattgcactccagcttgcatgacagcatgagaccttgactcaaaaaaaagaaagaaagaagaaagagagagagagagaaaaaggaaagaaggaaggaaggaaggaaggaaggaaggaaggaaggaaggaaggaaggaaggaaggaaggagagaaagagaaaatagaaaagaaaaggagtctttgttgatagataagaatctcacgctgggtctggtggctcttgcccgtagtcccagcactttaggaggctgaggctggtggatcactcgagcccaggagttcgaggccagcctggccaacatggtgaaacacaatctctaccaaaaatgcaaaatttagctggatgtgatggctcacacctgtaatctcagctattcagaaggctgaggcacgagaatcgcttgagcccgggaggcagaggttacagtgagccgaaattgtgccactgcactccatcctgggcaacagagtgagaccctgtctcaaaaaataaataaataaaataaaataataaagaatctctagatgtaatcatcctgaataatatgggcaggccttaaattcaatgataggtgtccttatagagaatggcagaaggagatttgagaaacacagaaaggaaggccatgtgaagacagaggtagagattaaagttatgcagccacagctaagggatgcctggagcccccgaaagctgggagaggcaagggaggattttcccctagagacttcaaagtgagcaccgtcctgccaaatcttttattttatttttttaaaatttgaatccatttatacagacttatcatacatttcagaaatactataagaaaacagaaataaatatcattgtctttgaagaagattttcttttttttttctttgctttgggataatatattttttcttttttttattattattattatactttaagttctagggtacatgtgcacaatgtgcaggtttgttacatatgtatacatgtgccatggtggtgtgctgcacccgttaactcgtcatttacattaggtatatcttctaatgctatccctcccctctcccccaaccccatgacaggccctagtgtgtgatgttccccaccctgtgtccaagtgttctcattgttcgattcccacctatgagtgagaacatgtggtgtttggttttctgtccttgtgaaagtttgctcagaatgatggtttctagcttcatctatgtctctacaaaggacatgaactcatccttttttatggctgcatagtattccatggtgtatgtgccacattttcttaatccagtctatcactgatggacatttgggttggttccaagtctttgctattgtgaatagtgccgctataaacatatgcgtgcatgtgtctttatagcagcatgatttataatcctttgggtatatacccagtaatgggatggctgggtcaaatggtatttctagttctacatccttcagaaatcgccacactgtcttccacaatggttgaactagtttacactcccaccaacagtgtaaaagtgttcctatttctccacatcctctccagcacctgttgtttcctgacttttcaatgattgccattctaactggtgtgagatggtatctcattgtggttttgatttgcatttctctaatggccagtgatcatgagcattttttatgtgtctgttggctgcataaatgtcttcttttgagaagtgtctgttcatatcctttgcccactttttgttggggttgtttgattttttcttatacatttgtttaagttctttgtagattctggatattagccctttgtcagatgggtagatttaaaaatttttctcccattctataggttgcctgttcactctgatggtagtttcttttgctgtgcagaagctctttagtttaattagatcccatttgtcaattttggctttcgttgccattgcttttgatgttttagtcacgaagtccttgcccatgcctatggcctgaatggtattgcctaggttttcctctagggtttttatggttttaggtctaacatttaagtctttaatccatcttgaattaatttttgtataaggtttaaggaaggggatccagtttcagctttctacatatggctagccagttttcccagcaccatttattaaatagggaatcctttccccatttcttgtttttgtcatgtttgtcaaagatcagatggttgtagatgtgtggtattatttccgagggctctattctgttccattggtccatatctctgttttggtaccagtaccatgctgttttgattactgtagccttgtagtatagtttgaggtcaggaagtgtgatgcctccagctttgttctttttgcttaggattgtcttggcaatgcgggctctttttggttccatatgaactttaaagtagttttttccaattctgtgaagaaagtcattggtagcttgatggggatggcgttgaatctataaatttccttgggcagtatggccattttctcgatattgattcttgctatccacaagcatggaatattcttccatttgtttgtgtcctcttttatttcattgagcagtggtttgtagttctccttgaagaggtccttcatgtcccttgtaagttggattcctaggtatttattctcattgaagcaattgtgaatgggagttcactcatgatttggctctctgtttgtctgttattggtgtataggaatgcttgtgatttttgcacattgattttgtatcctgagactttgctgacgttgcttatcagtttaaggagattttgggctgagatgatggagttttctaaatatacaatcatgtcatctgcaaacagggacaatttgacttcctcttttcctacttgaataccctttatttctttctcttgcctgattgccctggccagaacttccaacactgtgttgaataggagtggtgagagagggcatccctgtcttgtgccagttttcaaatggaatgcctccagtttttgcccattcagtatgatattggctgcgggtttgtcataaatagctcttattattttgagatacatcccatcaatacctagtttattgagagtttttagcatgaagggctgttgaattttttcaaaggccttttctgcatctattgagataatcatgtggtttttgtctttggttctgtttatatgatggattacgtttattgatttgcgtatgtttaaccagccttgcatcccaggggtgaagccaagttgatcgtggtggataagctttttgatgtgctgctggattcagtttgtcagtattttattgaggatttttgcattgatgttcatcagggatattggtataaaattctctttttttgttgtgtctctgccaggctttggtatcaggatgatgttggcctcataaaatgaattagggaggattcactcttgttctattgattggagtagtttcagaaggaatggtaccagctcctctttataccgctggtagaattctgttgtgactccatctggtcctggactttggttggtaggctattaattattgcctcaatttcagaacctgttatttgtctattcaaggattcaacttcttcccagtttagtcttgggagggtgtatgtgtcgaggaatttatccatttcttctagattttctagtttatttgtgtagaggtgtttatagtattctctgatggtagtttgtatttctgtgggattggtggtgatatcctctttaacattttttattgcgtctatctgattcttctctctttttttctttattagtcttgctagtggtctatctattttgttgatcttttcaaaaaaccagctcctggattcattgattttttgaagggatttttatgtctctgtctccttagttctgctctgatcttagttatttcttgccttctgctagcttttgaatatgtttgctcttgcttctctagttcttttatttgtgattttaaggtgtcgatttcagatctttcctgctttctcttgtgggtatttagtgctataaatttccctctacacactgctttaaatgtgtcccagagattctggtatgttgtgtctttgttcttgttggtttcaaagaacatctttatttctgccttcatttcattatgtacccagtagtcattcaggagcaggttgttcagtttccatgtagttgagcggttttgagtgagtttcttaatcctgagttctagtttgattgcactgtggtctgagagacagtgtgctataatttctgttcttttacatttgctgaggagtgctttacttccaactacgtggtcaattttggaataagtatgatgtggtgctgagaagaatgtgtattctgttgatttggggtggagagttctgtagatgtctattaggtccgcttggttcagagttgagttcaattcctggatatccttgtcaactttctgtcttgttgatctgtctaatgttgacagtggggtgttaaagtctcccattattattgtgtgggagtctaagtctctttgtaggtctctaaggacttgctttatgaatctgtgtgctcctgtattgggtgcatatgtatttaggatagttagctcttcttgttgaattgatccctttaccattatgtaatggccttctttgtctcttttaatctttgttggtttaaagtctgttttatcagagactaggattgcaacccctgctttttttttttgttttccatttgcttggtagatcttcctccatcactttattttgagcctatgtgggtctctgcatgtgagatgggtctcccaaatacagcacactgatgggtcttgactttttatccagtttgccagtctgtgtcttttaagtggagcatttagcccatttacatttaaggttaatattgttatgtgtgaatttgatcctgtcattatgatgttagctggttattttgcccattagttgatgcagtttcttcccagtatcaatggtctttacaatctggcttgtttttgcagtggctagtaccggtttttcctttccatgtttagtgcttccttcaggagctcttgtaaggcaggcctggtggtgacaaagtctctcagcatttgttggtctgtaaaggattttatttctccttcacttatgaagcttagttcagctggatatgaaattctgggttgaaaattctcttctttaagaatgttgaatattggcccccactctcttctggcttgcagagtttctgccaagacatccgctgttagtctgttgggcttccctttgtgggtaacctgacctttctctctggctgcccataacattttttcctttgtttcaactttgatgaatctgacaattatgtgtcttggagttgctcttctcaaggagtatctttgtggcattctctgtatttcctgaatttgaatgttctgccaactcctttatgtcagacttctggcctccaaaactatgaaagaataaactcctgttgttttaagccaccaagtttgtgacaatttgttacggcagccacaggaaactaatacaccaagattggccaactcaaatggatagtcttgtttcattgtttcctttataacccatgttttatatatctatatctatctatatataaacatatatatatatgtgctatccatcaaaatgtttataattttttttgtttttggagacaagttctccctctgtcacccaggctggagggtagtggtgagatcatagttcattgcaggcttgaactcctggtctcaagcaatcctctcacctcagcctccccagtagctgggactacaggtgcacaccatcacatcctgctactttttttttttttaaagatggggtctcactatgttgcccaggctggtctcaaactcctggccttaagcaatcccctcaccctagcctcccaaacagctgggattacaggcatgagccaccacaactggcccttgtttatgatttttaaatatattcagtaaattaaaaatacaagtcataaacagtatgatccaattttgattttgaaacaatacatgacaactatccattacccagtgagtgtttgcactacatatttttctgaataaataattagaaggctttaaacccatatagtatcaatggataggtcccagatcttattctcttgtccagatttgaggaagtcacttctgagattgagccagtcttcctcaattatgtggaaatattcagttgttttcccatcaatagacccagaccagagatcaaaaactcaaatatctatagtagccaggcagaaatattctttaaggatgttggtaccatagaagacattcaggtatcttaggtactgtggcaaactggaaagaacattcttgtcttgagttggagctccagctcatccccaactgcctgttgtcacagggaagtcaggctgaatgttaccaaatcttctgatttttaaagaggtactggaaatttcagtttttatatgaaaacttctgttttttaaacacaagcatctaattcacattctcttaaaacatttttcaggccaaataaaatccagaagctcagtcctttaagtttccacttgggatttagaccttcataaataaagaccatttcattcttcccagaggttaagaaatccaggtttcagaacacaatgcctaggcttctttgttggaagagacatggaaaaattcctctcattctttgctgatgagcctacaaccttgaacacaagacacagttaactctgtaatcaagttattctgccacgtgaaatttttcacaaattgtcctgctaagtaaacactgtgccaaatatatggtgtatctcaatgcatggtagatcattatcacaatgattagtatgagttttctcctcctcctttggatagtccaacagtagagataggggtaggataatgtggtacccaggaaatggtagaagagcctttatttctcaggccatcacagtagcagatgcttattgaccaagcctgcagggtctgttcaaaggcaaaggaccctattctctccattatgcttagtgccaagcagagtcataggaaacttccactgtggcactaaaggcagtggttcttggtgttcagtctggttccccaggaccactgctccccattcccatcaaatgtccaatcccttctggggtacaacatgggagcagctgttccacttagcccccttcagcctttggggtccctctacttcttggataatctagcacgtttaggaacctagggcttgagaggttggggaaggaaaagccttttaatgacaccagaaaacaaaagcaggctcacttgattgcttgaagtgggtcaaagaccaagagagaaaaattctacttattgttttcatgttttcttactgtaagaaacctaagagaaattaatctctcaatggatccagccaccacattatcatattcaggagaaatgtccctaaattccagacttttgagtctgccctagagtcagatctctgtctgccatttgagaagctaacaagccaagtagtgcccaggaatgtccataataaaccaaaggcataggcaagagaggcagagaggcatttgtgttgggaaggaccacaggaacactctcactacactgcggctccacaaagctttattctcctgcccaggtctagaggaaagtctcttgaggccaggatattatagatgacttctaggactggaacaatgacttgctcctagtagggctcaataaacttgttgcttaatcgtttctaagaagctgtgcgaaagtgagaaagcctcagtctctctgtttcagcttctccaaatgtgactaacagcagcaaccctgtctattgctgagaactgctgtgcagatgaaaacagacaaatatatgtagttttaaatgtaggcaatgtgcttgtaaatttgcattttgaaaagctagaaatgcccttgagtaaactgccaactccttgcagaaaagataaagaaaattttgttccgcccagaacaaaaagatcctggctattccattaaaacatagccttgcagtgttatctaagaatttgttacacactttgtaagctttgttagctagactgattagatagataactgtgattttgaactatgacatctattccaaaaggttttagaaacaacatgcattactatgtaactaaagattcaaagtaaacaggtcttttaaggtttatctaggctatgtaatgacaatacaaacgggcattttgataacaaagcagtattaggtcagcacttacaattcaatgtgagtctggaatttaaaataatgggcagtctgacatcctccatattgtctctgttctagctcaggagactatacagtctacttttcaaactccaaagcttaaggtgttagaacaaatgccttcaactgattgtttagacttttcactcctaggctcacttaaaaaaaattagcagtaatactatgttaataaattcagtcattccatgtgttttttttgtttgtttttttggttttttttgagatggagtttcgctcttgtcgcccaggctggagtgcaatggcatgatctcggctcaccacaacttccgcctcccgggttcaagcgattctcctgcctcagcctctcaagtagctgggattataggcatatgccactacacccggctaattttgtatttttagtagagacggggtttctccatgttggtcaggctggtctcgaactcccgacctcaggtgatctgcccacctcggcctcccaaagtgttgggattacaggcatgagccaccgtgcccagcccagtcattccatgttttgtgagggaaaaaaacttgaaaaaatattgaaataattattatgtagtactttaaaaatgttttccagacacttttaagacaataataaaataaaagaattatagagattgaggaaacctaaaagaaatagtcactggtctaattttacaaacaaagaaaccggccccagagttttgggtgaactgacctgctcaaactggtgttagcaaatcataaccaaatttgttgcaacaacagcaacaacaacaacaaaagaaaatcttttttttttttttttgagtcttgctctgtcacccaggctggagtgcagtggtgtgatctcagcttactgcaacctctgcctcccaggctcaagcaattctcgtgcctcagcctcctgagtaactgggattacaggtgtgagccactatgcccagctaatttttgtatttttggtaaagactgggtttccccatgttggccaggctggtctcgaactcctggcctcaagtgatccacccgcctctgcctcctgtcagatatgagttctaaatttctttacaaagaatcaatatgtcagtatgttcaattatttgccttctacttttaaacttaacttcctcataaagcaacctttttggattaactgctccaccctgactcatttcaatcacctgcaccaccctgactcattctgattacctactccacccagacaaattccgattaccagctctgtcataaccatttttcccgccaaaccactcaccccgtcactctctttaaattagccaatcggaattagtttagcctgtgcagtctaaccctagccaataggggaagaacacagcagcaggggccacgtgtgtcagggataagaacaccttcccctttcttgtccagtgtgcgctcaccattgctccatttgtaagggtgcacccttctctagaagtaacttgccttgctgagaattaaaaagaaaattttatattcgagtgctatttcttttgtagcaccaaaactttatttataacactcccaaagtgctgggattacaggggtgagctaccactcctggccaaaaaagtctattgatagagaattattttcttttttctttttttttttttttttttttgagatggagttttgctctttcgcccaggctggagtgcagtggtgcgatttctgctcactgcaacctcggcctcctgggttcaaggaattctcctacctcagcctcccgagtagctgggattacaggtgtgagccaccgcgcccggccataaattggtgtatttgtgtatgcacacttggataccaaaatccacggatattgaagtccctaatataaaatggcatagtattttcatataacccatgcacatcctcctgtatactttaaatcatctgtagattacttgtaacatctaatacagtgtaaatgctatgtaaatagttgttataccatattgtttggggaataatgagaagaaagcaaaaagtctgtacatgttgagtacagacaactttttttctgaatatttttgatctgaggttggttgaatccacagatgctgaacccacggatacggatggctgaccacggttgttactctttcacttcgaggcatcaggttttatcctttggatttagacaggactaggatatccatatcaattttaattccattacacttctgtcaattcaatttttttcagtaaactgttattaatacattttacatatacttttatcaaaactgggtgctgaggaaagaatacattcaagtcttggaaaatacctgccacaaaacctaaagagctaatcctctatgtcaatccaatcagccttatttcactttcatataaagcctgactttttcttttttttctcaaaaattaatcagtgtgcaataactttgtttttcaattcaaattaatgtattaattcatatctcaaaaacattgttaaaaacaactgagaaatatcttcagggaagtaccacataatattactaaaaaagattaaatcaataacatgataattaatatatcattttataacatgttattcaaacgtgctaagcaagataataaatcaatttgctgtttcaacaattttgaactcgaataagaaaatcacttgaatttgctttttgtctaacatcatttccatagtcaaaaataaatataaaataggctgggcacagtgggtcagcctgtaatcccagcactttgggaggccgaggtgggtggaacacctgtcaggagttcaagaccagcctggctaatgtggcaaaatgccgtctctactaaaaatacaaaagttagccaggtgtggtggtacatgcctgtaatgccagctactcgggaggctgaggcaggagaatcgcttgaacctaggaggtggtggttgcagtgagccaaaattgcaccactgccctctaccctcggtgacagagggagattccatctcaaaaataaataaaatacatataaaataaatgcaagtaataattcattagccaaaaaaagtaagaaatgtgcattaaaatgatctataacataaccacatttatttaagaatgtattccaatatcaaatggcaaatttcaacaaagcaaaaactttttcccaccaacgtgatactttgtaaaaatgtaatagaatgtgtgactaaacttttaggttatttgtgaagttagaggtatcataaaaggcatagtattcttctgaaaaatttagtttgatcaaactctggtgttcatttgttgagaaagaataagaaccaagaatacaaatcaaactccattaagaaaataaaaagacaagccacagactgggagaaaatatttgcatatctgataaaggatgggcaaaagacatgaaaagatctcacttcaccaaaaaagatatacagacggaaaataagcatacgaaaagaagttcaacatcatatgtcattagggaattacaaattaaaacaaaaaattagaaactactacacacctatttaaatagctaaaatggaaaacactgacaatacaaaatgctgatgaggatgtggagcaacagaaacttcagttcattgctggtaggaatgcaaatgatacagccagtgtgaaagtcggtttggcagtattttacaaaactaaacatactcttaattatgcagcaatggttttgctccttggtatcacccaaacttatgactaacccaaaacctgcatatgaatgtttagttaataaataacatatttatgccaataacatatagcatattattatttagttaataataaacatagcagcttcattctaatttctaaaacttgaacatgacaatgatttccttcaatatgtgaatggacaggctgtagtacatccatacaatggaatattattcagcactaacatgaaatgagttatcaagccacgaaaagacatagaggaaccttaaatgcatattactaagtgaaagaagccaaccccaaaaggctacatactatatgattccatctatatgacattctggaaaaggcaaaactatggagacagtaaaaggtcagttgttcctggagttgtgggggagagatggatgaacaggtggagcacaggagcatttcagagcagtaaaactcttctgtccgatactgttgtggtgggtatatgtcattagacatttgtccaaacccatagaatgtaccacacaaagaattaaccctaatgtaaactgtggactttagttaataataatgaatcaatattggctcatcaatcataacaaatgtaacatactaatgcaagatattaatcatcagggaaatgttgggagggggagaaacaagaagagatttgggaactctgtacttttcactcatttgttctgtaaacctaaaactgctctaaaaaacagtctgttaatttaaaaaatatcaaactctgtaattttgtttaaatatatgatcaaaatttccctatgaattaatgaaagaaaagtgtatgcattgctaaaaaaatccagaagctagcattttatttcttattaatcgaaagaaggaaatatgcaaaatttaataaataaaaatgagaattaggccaaagagggagaaggctagaagcttgaggccaggaggttgaggccatggtgagctaggattatgccactgcactccagcctgggtgatggagcaagaccctgtttctaaaaaaaaattgcttcattcaaaaaatatttttaaagatgagaattgaccatatttgaaataaatatttcatgatgatttgataatcaattctaactatattctttatgtaataatatacagcaagtccaaaataaataaaaaatttatccatgacttattcctgaaaaattgggtagtcatgaaaaacatttaaaatagtcagaatcattcacctattctgctttgggtgtttatagttgcttccctttcctttttaaaatttttttatttttaatttttgtgggtacgtagtagatgtatatgtttatgggttcctttctaatcaatgatacattttaggaataagtaattgaagaggtaaaaaataatcaatatttacatatacttaaatatattgacagtcactccttcataccaatatccttttttttttgtttttttttttttaggcagtcttgctctgttgcacaggctggagtgcaatggtgcagtctcaccttactgcaacccctgcctcccaggttcaagccattctcctgccctcagcctcccaagtagctggggttataggcacacgccacaatgcccagctagtttttgtatttttagtagagacggggtttcaccatgttggccaggctggtctcgaactcctgacctcaggtgatccacctgcctcggcctcccaaagtgccggaggcatgagccaccatgcctggcccaatatcctctttttttactcaccaggtgatgcattctttaacagctgccttatttagaggaaccactaggacagggccactcagattaaggaagaaagatgttaaacaacaattatcattactcctaccatcacactcaaccaaatatctcaataccaaaatggccatttctaatgctggttttactctcagaaataaggttttctaaatgagagtttctaagccttatctgggaaccacatcatcgtaggaaccttctctttggtgtcctaggagttctcatacccaaggccagcttgatttgggatggtgatgggtctttctttgtaaagtgagaaaaggcctatggtaagcacaagcacgttatcagcaagggttttgttttgttttgttttgttttttaagagaaaatattaaaagaaagttgaatgtctgacatggaatctctcaaaactatccaggcacgcttacgcaaaactaatttctctcctgttttccctctactgttctccttccacagctaagggggagaggggagtcctgaatctgattttttaaaaagtgcctccaggcaagtctgatgattaaccatccagtttggaaaccacccaacaatgtacattcattggggcttgatgaggtcactctccaccattcatcacattacttatggattaggctggcctgccagaaggaaaatacagcatattacaaaatttcatcgaaactatctaaatcactctcttgggctaaaatatctgcaaggaaatccaaacactcttctgtattactgaagtcctttgtttccaagtaacacatcaatttaacataaataaaaagaagaatttattttaaggacaataaacatctaaaggaacgcaacaccaaaactgctgcctggtctgaggagggactgcaaccaggcatttctttacctgtcttgcttgttttcttctccttgtgtgctccattcttttttcttgaagacagaggctgctccgttcctaaggcagatggtaatgccactgtccatgagttgtaacatttcctccactgaagagtctagctcagagagatctctccatcctttttccaaattcctgaagaagggacattgaatggcctatttggaataaaagattcactccttagttcagtcaactgaagccagaggggcagtcacatacaaatagggttgccggggatgacttcagcatgttgggaacagggaggggagagcaaaggaagcaattaagggagtcatcctgagaagagcaggagttctcccaaggtgtactactactacatcctgtaagctccggacagccaatgtggacaaggaaatcttccaaggtagcacttattagctactgtaaggaatgacgtcactgagcccttaccaccaagactattttgctgtaacttctagttttcagtaatgccattgataagttttgtgcccataggattctcattcctatatatgtgatctattttttcccctctctgaaagtcttcaggatatttctttatccgtgttgctctaaaacttcacgatgatattctaagatgtgagtctatttttatttattgctctgggcacttactcagggagccccctttttaatcttcattttaatttttttaaataaaaaatccccatttggaggtaatctcagactttttacaaaattgtaaatatggtataaagaattcccagattccccaaatgtaacttggtacataagcataatttatcaagactaaggaattaacaatacaatagcttatcctacagaccttatttaaattttgtcaactgtcctattaattttcttttcctggttcaggattgcagtggactgaatgcttatgtccccttaaaatcaatatgttgaaatgcgagcccccaagatgacagcattaggagctagggcttttgggaaataatcaggtcattatacgatttaataacacctctcctgtatagaatgtatcccagttgtaacttcagatttctccttgtgatttgattaatttgtctcccccattagaatataagtttcatgatgggagtaatcatgtcaggttgctttggtcaccattatattcccagtacctaaaatagtgtttagcacatattatgtcctcaatgaatatttattaaacaaatgaataaattcctttaaaacattttatgatgctgggaaccattgttaagagaattgtttttgcctaaaaactcaaagaacactgcaataccatcttccaggttccccgtgtggttgggcatggtgttgtaaaacagatgaaataaatctcaaacaaatgaactaccctgttaacaatgaggaatgtgttagccaaatcacctataactcattgtaactggccacattattatggagaatggccttagggacttgaacaaacttctcataacataccagagtctggtcttaccaggagtataaaatcaatgggtaattaactgaaccaagaccaggcctgcctccttgccccagcacagatgtgcactgatttcaagagggcacaatttatgtttcatggtgagtaaaggaggcttcagaccaaggacttgccaatgactagccatatggaagccaaactttaccctctcttttaaaagtgcaaagatggtgtcaaattcaacatttgtggcatttcttagagttttatgatttaggtttttgtttttgttttgttttgtgttttgttttgtttgagacggagtttcattcttgttgcccaggctggagtgcaatggcgcgatctcggctcacagcaacctccgcctcccaggttcaagcgattctcccgcttcagcctcccaagtagctgggattacaggcatgcgccaccaggccggctaattttttgtatttttagtggagacggggtttctccgtgttggtcaggctggtctcaaactcccaatctcaggtgatctgcccgcctcggcctcccaaagtgctgggattacaggcgtgagccaccgcagcaggctgatttcggtttttatttaatagaaaagcattgcatttatttgtaacagccaaaaattggaaacatttcaaatgtccttcagttgggtgaatggttagactgtggaacacctatatcatggaatacaactcagcagtaaaaaggaacacgttattgatatgcacaactcctccaatggatctcaagggaattatgctaagtgggaaaaaagccaatatcaaatacatattgtatgattccacttatataacattcttaaaatgaccagatgatagacatagagaacagattagtgatttccagaggttgggagtgagaagagggcgaaaggcatgactataaggtagcagtataatgaatctttatggtagaacagtcctgtatcttgattgtggtggtggttacccatgtctacactagataaaattgcacagaactatgtacacatacacacacacacacaactacatctaaaattggtgaaatctgaataagatctgtcaattgtaccaatgtcaacttcctaattctgatcctgtactagagttgggtaagattttggcattggtggaatctgggtgaagtatacacgaaacctccacatgacaggttgagcaatcctaatctgaaaacctgaaatctgaaatgctcaaaatctgaaatttattaaaacaaatgttcaatgcaatgtatttgcaagagcaaaacaatttaagcaatataaatgctcatcagtaagggatgagttaggccaattatttatatgcaatattaggataatatggaatgaaatgagggcatacccatgctaagctgttacaagtggttgccctgggagtaaagaaatacacattaactttttctttagatatttcaacatcgttatactacttttataatgtaaaaactaaaaatattgtgcccagaaaaagagagaaacagtcatttctcattatccataggagattggttccaggacaccctaaaatccacaaatgcttaagtccttatacataatggtggagtacttgcatataacctacacacatcctcctgaatacttaaaatcatcttttgggccaggcacggtggctcatgtctgtaattccagcactttgggaggcagaggtgggtggattacctgaggtcagcagtttgagaccagcctggccaacatggtgaaaccccatctctactaaaaatacaaaaattagctgggtatggtggtgcgcgcctgtaatcccagctacttgggagcctgaggcaggagaatcgcttgaaccaggaggcggagtttgcagtgagccaagatcataccattgcactccagcctgggcaacagagcgagactccacctcaaaaaaagaaaaaaagaaatcatcatttggttacttataatacctaatacaatgcaaatgtcacgtaatagttgttatggtgtcttttttagggaataatgaccaaaataagtctgtccgtgttcagtacagaaacaaccatccattttccccccgaatcaaaatctgaaattttctgagtgctgaaatgatgctcaaagaaaatactcattgaatcattttggagttcagattttttgattagggatgttcaactggtaagtataatgcaaatattccaaaatctgaaaaaatccgaaaaaatccaaaatccaaaacacttctggtcctaagcattttggataattaatactcaacctgtatttttgcaactttctgtgaatctataatggcttcaaaataaaaacttattttatgcaatataagttatttctagtaaaacaacattcagcatatatgtttgccttcatttacttctgaaatcccactaaatggagtaaagaaaagattataaacataaaagtatacaaccacacacccccaccccagtatgagaccatagaaatggagatgactgtaaaaatatagaaactggaaaatagatgtacatgagataactatttatagtaggtttctgtgaaaccgtagtagtagagatgaccccagagcaaggagcagtcagcagggatgactccattctggacaaggccactaagaagacctgttatgtaggcctggacaaagtaccacaaagccaagcagctatggagaacacatggctcgaggcattcgctggcctttctgtctctgaagcagttgcttagcaatgtgacaagatgccagacagttggagacccaagtaagtgttcacatgctggggggaagcagagggatggctgaatatggggctagtggtggatctaaagtctgaactattgggggccagacacagtggctgacacctgtaatcccagcattttgggaggctaaggtgagtgaatcacttgaggtcaggagatcgagaacagcctggccaacatggtgaaaccctatctctactaaaaatacaaaaattatctgagcatggtggtgcgtgtctgtagtcccagctactcaggaggctgaggcaggagaatcgcttgaacctgggaggcggaggatgcagtgagccgagattgcaccactgccctccagcctgggcgacagagtgagactctgtctcaaaaataaaaaattttaaaataaataaataaagtcagagctattgggaaaaatcaaatagcacaggggctgaggaagagtggtctcagtgcctccggtgtctgaggcttgctctgtggactagaagggagtagacaaacctgatttatagggccaaggttgggctggacacccccagtctaaatcaacagttttcaaactttgtaaagcagtggaacattttctccaaagtaaatcttaaataaaagtgtaaaccaccaaaacaaagtggggttgctctggtagcaactgcatccttgatttccaggcctcctgagggtcccacatccagatgttgaagcaaaaaggaattcaaaaatgcagtaattttctttattgagaagttaggttagaaacccaattttcaagtatgcaaattaactagaatgtctccagtctgtgttagatagaacctgaaaacggaaattttgaactagcacaccagtcaccatttccagtctgctctctcagcaggccccatggcccctgtaatttagctagttaaggcttttcctctggccaaacagctaaacttgagccaggtggacttaaacacatgaaccaattcagtttactgtctaaaaatgaaagagaaaagtctgccaggatcttctcctcgtccccacaaagttcccaagagcagaattcagccctcctcccctcccactacaaacacaggagagaggccagcccaatataacttaaaacagagcgaccctgcagccctctcagacaaattacatcaaaacaagtcaaagcaaatgcaactgtccttaccagttttgtaaaggaattgcctgggaaccattccttttcagacctaattaaaaagtcagttttgaattacagaacaagatggtatgagagccagtgttcaacaggcagaacaaacaaacatgcaaagataaaatgcatgggcttttacagagagctgctgccagcgacagcagaaatggctctctttcagccaagtctagggtgccctggaaaacttcatacctctccagggagacagttcccagaaacctccctcccctgcaaagcactcctataacaaataaataaactacatttcccaaagttctctttgctcaggcctggggctatattttaaaccactctgtaattgtcccccaccagaaaagcagaaatgtttaaatgtgacaaccttttgacatacagagttgactcagctcatttcaaatttcatcttatctccagtgtccttgggcatgttttaaaagataaaaataccaaatgtgaccaagatcgtcaaggtataatggaacaagggtccaatgtttttttaccctcaacgaatgcattatacttcatttagatcagcggtctcaaatattagcatgcgtcagaatcacctgaattcagggcttgttaaaatacagattgctgaaccgtacctccacaatctcagattcagcagatttggagggggtccgaagaatatgcgtttctagcaagttccaccggttctggattacactttaagaactgctctcagagattatctacatggtcaattccaaatctatcaagaaagaaggcacacagttactgatttctgcaagctttgaactagcagtatctttaaggagaagaccccagccatctctagcagtgtggggaagagtaaaaggcaaagcctctagttccggaagatccagaaactggcactgcctggtccagcattttcattttcccactgaggaaatgtaggcttagagggaatcaatttgtgcagtctcccagtgagtccgtggttgtgctgggacaaagtacccagttgtcctggcttccactccagtgctctggcccttgctggagtaaaatgggacacctgggcttggcaaggaacaaggacgccaacatgattctgattcatcccaatttctccacagccttctgccttttctctgcattggtaaaagtataatccccaacccaggaattttactctcgctttcgttcatgtcttcgtagcctaagacaggcagtcaaaatgggacagctgacagccacaacagcctttaattacaatatctggaggacacattaatgaatgtagacccatttatttacttttttatgtaccttgtctgtgcgacagcaagcaactagaatctcaggaaacaccaaccagacccaggcatcaatctgctactctgttattagaaggaaattagcctttaagaaaaattgtctaggcttaccaatcactcccaccagccaccaggggtcacataaatagaagttttcactggacctttctaattcacaaacctaccctcttccaccacaggccttggtagaacacataattcagcagcaagaatcccttgaagaagaaaagaaaacacctataaaactatatttttttctaattccagagacatgaaaccctttaggagtttaggccagggttcatgacaatccattatctgaaagcacagatgtacagataaaccattatttttgtaaagatacatcttctaaaacaccagtcagcttggcattgtgtttgtccttgaattgaagaacgatatcattttatcgtcctagccttgagcatggttatcaatgccagtaactaagaggcctaatttgaaagatggtcatgatgtccgacttacaaatgccttctactcagttaacagggactgctgaaagcaaatggcttatacattgttgcacaagtggaaaatctggcctcctaacagttgttaaatgtgccagctaagagcctctgaaggtcagtctaccagggctggggcagtgaccacagccacgtgctgcgccttttgcagctcagcaccgcatggtgcagctgttgtattggccaaagaaagtgctggcagccccgggagaaacagagacttaattcacttgcaggaactttcctgaaagagtcttttaaaaagcatttaaggcagaccaggtgcacttattttctttttaaatctcattgctttgtcaagtattctcgtttatggctccaacactctttatgtgcaacattaaccatcctttgttacattataaattataacgagaacttttataaaacatatttaatgataattcatgatttctaggtagattcctttagatgtataacatttaaatatccatggtatagcactcttgatatgtacatagcagggattgcaatttaggttgcctggggttttgttaaaagttttgtaagttgtgcagactttatctttaaataaaactgtgtgtgtgtgtgtgtgtgagagagagagagagagagagagatacacagtgcttagatataaacagtagtaaaagaaagctgattcaattcagtatgttacactgttaagacttccagctgtcaagtgcttccactataaacaggaggcgggaagaatgggatctagagggaatagagattgcataaaagtgaaacttcatgatgtgagggccgggggttggactcaagtcatcatctatttaggtgaaaactgccaataccctgaataattctaggaaatactctggtccttcactagactctgaaagtactcaggccacaaactctcccagtcctagcatgacaaaagacctccctatgccaataagtaaaaatgagtgccagagccatcctcaaaggtaaatatctggggtaggcagctgtttgcataatgtgattttaagtgtgacaagcacgtactccacccaaaaaaaaatctatgctatagacccaggtcacggatgcctgcaattctaccattagggagtatttccatcccagtcagagacttaggaatcatccttgactcctctctctccttctctgaccccattcaatcaatcatgaattcctccttcctagcttgactctgtccctttatcttcattccctctgacagtacatagttcaggtcaccatcgactcctgccaggatgactgtggttacctcctgacctgtctgtgtgcctccaatttgttctccacactgcaactgcaacaaatgtgatctttctaagatgcagatctgattatgacagtccccagattaaaaccattagctgggtcctcaaggccctcagaatgaagtccagattcgttaatggggtttacaagcccttatgctctggccatggctgaccactgtgggctctcctatgccactgcctccccgtcagtgcactcacctttccttagtcccttacttttgcttccaggcctttgtacacattgtcccctttgcttggtacactctccccgtttcctacctttgttcccaaagactgcatgaccctaaatttatccctactttagcactttcttactatgtaagctttatccatctgactctaattctttctgaattaggactatgtatttcacaaatgccagaactcttacttattcactactttatttccaggacctagcaaatacttgtctcatagcagtcactcaataaatatttgttgactaaatgaacaagtgaatcagtaaatgtcttatcttttattaacaacgttagcaattcacacttcagtgtgatttttcttactacagctctctaagaatatatttgagacggttaatgaaataaaggcagaattggctctggaaaaccaggggacagtataaaggcaatggttagccaagaaagaaaggcactgagaaggaaggtaagaacaggttctattgggattgcttagataggggtcctttctagataaaaagaaaatagcggctgggcacggtggctcatgcctgtaatctcagctctttgggaggccaaggttgggtggatcacttgaggtcaggagttcgagaccagcctggccaaaatgatgaaaccctatccctactaaaaatacaaaaattaaccaggcatggtggtgcatgcctgtagtcccagctactcaggaggctgaggcagaagaagtgcctgaaccgaggaggtggaggttgcagtgaggcaagattgcaccactgcacttcagcctgggtgacagagcaagacttgcgaagaaagagaaagaaagaaagaaggaaggaaggaaggaaagaaagaaagaaagaaagaaagaaagaaagaaagaaagaaagaaagaaagaaagaaagaaagagaaagaaagaaagaaagaaagaaagaaagaaagaaagaaagaaagaaagaaaaagaaagagaaagagaaagagagagggagggaggaaagaaaggaaagaaagaaggaaaggaaaggaaaggaaagaggaaggaaaaagaacttaaaaaaaaaagcaaccaaagcttgagttctgttcctgatttcatccccaaggttaccaccaagaaaggtggttttcctctgcatgggttgtacagtgaagtacccgcacttggcctgtggctccacccacagctggctcaatgactgtggcctgtgccatggagaagctgcaagaacaaggcagagtggactggacagtctgtgtcaccctggccaatttgaccaaacttatctagtcacagatggttatgaataattttttgcttatcacagcctttcggaaaagtattaaagtttcagcagcccatgcttcatgtattttcctccccaagtatacccttttacctataatcagtatagcggaaggataagatgtaaaatgtgttcactggtttattagtttgttatactactgacctcagtcaatcacccggtgatgtttctgggcaatacaaaaatatcttcttccttctatcccgtgatagggggtattttctaagcctcagacatgagcccccactttttttcctctctcttctttccttggtgaaccaattctacatactgatgatgcctaaatctaatacatccaccttgacctcataaacagaatccacccccacatatttcattgtctgtaggacattttcctttggacagctcatcaatcaattcaacaagcccaaactaccttgttatcttaccttcctccaaaaaaatatctgagccacagctgcaacatcctaactttttccagtacatcattaatctcctagtcacatgtcagaaaactcactccttccactagaacataaactgtcacctcatcaatgagggccaccttgactactccatttaaaatttcatctctatggccccagcattcttgattcccccttaaagtgctctgtttgttcccagcatttattgttttctagtatgctacataatttacctatctacttattatttctcattctgtccccaaatcttactagaatgtaagcaccactgaagacagagacttctgttcacagatatcatccctgtgcttataacagtgcccgacatacagtaagtgctcaataaatatttgttcaattaattcattcactctacaagtatatacttaatataacaaataatgtaacttaaaataccttactcctctaattggaatttacactctgtgaagtagaggtctttgacttctttgttcactgctgtgtccccagaatctagaatggcaccaggtagcaaaggtgttcaataaaaatctgttgaataaatgaacgaatggataggaactcattgagtaccttttagtaccaagtactaagtgaggtgcttggggattctagatattttaaataactaactatgatgcaatgggataaatataaataatagaagtaggaacaaaatggcatgggaactcaggagcaatggcactgaagatcattcttcacgcctgagtctgaaagaagacacagatgtttatctgctccctgtgccaggtaaagggccacaaagggattaaagtgtatggtatggcgcaatgtttctcaactgttatttccatatgagttacctggggactcttgttaaaacagactctggtttgatgggcctgaggtaagccctaagatttcacatctctaacaaggtgttgttgaggctgctggtcctcaaaccacacactgactgacaaatgtacacaactcggcacccatcccccttatttctttttactagactaaaattttgtctatgtatctaacactccctcctccagtatggagaggaagtggttctagtcccagctccagggttagactggatttgagcttggccaatcaggacaaggcattcttttgactgattactgggtgagaatgggaatgggaagtaaggatgcatgatctgtttaggggaaaggttttcctttctatgctgctgtccttaaacaaagaagcgtatggcttgatggctacaggcagccatcctccaacatgagaagcatgagcctcaagatgaaccgaatgccaagggtgctgagtggagagggggagagaacctgggtccttgatgatcacttagctgctgattgtgttgatcctggaatctactctacctctgatctttcaggtatgtgaaatgataaatatccttattgttcaagccaatttgaggtcaaggcttctacttgcagcagaaattatcctaatggttacatctgatttttgtttatttgtttagggaacaaatatttattgaatactactatgtcccaggcaccagaaaaataagacaggcataattctctaccctcgtaaaatttatagcctagatgataaattaatttgatagagttcaaatttctgagatgagcacgatttcattttaaattatttatattcttggatggggactacttctccctccctagccctgcccctgaaatagttctttattagtcatctctgccctagtacaactgccttcatcctaaaacagagctttgtctccttacgcttgaaaattgcaacagtaccctaacacccctctcagatccaatctacaaactagtaccctattaatcttcctaaagcatcaaattcacgagagaaaattctccagagaccctccattgcttaaagcagtgattttcaagcttgctttatgaaagcaaaaaactgtttcttcaaaagcaaaaaaggttattatacaaagtcacaatgtattaaatagacaaactagtgctgtgctgtagaagtgagggacacccagaatctcatcccctccccaaccccattcctacttcacttcccaacacacccacttcctgaggagtggtagagttcaactggtgccttcacttcacatagtttcacaaacagtagccttgtcatagggtaaaattaaaaatttccacttgtcattctattacctgcctctgttatctgcccacattcttgatttgaccaagtccagcctccccactacccttcaaacatacacactcaagtctttgcctaggctattacttgcatcagaaatgtctgggccaggtgcaatggctcatgcctgtaatcccagcactttgggaggcagaggctggtggatcacttgaggtcaggagtttgagaccagcctgggcaacatagtgaaaccccatctctacaaaaaatacaaaaattagctgggtgtggtcgctcatgcctgtaatcctagctactcgggaggctgaggtgggaggatagcttgagcccaataggtggaggctgcagtgacctctgatagtgtcactgctcttcagcatgggcgacagagaccctgtctcaaaaataaaaaaataataacaataaaaaaataaaagaaaagaaagagaaagagaaagaaagaaataagaaaagctgtgtgtccatgtctgtgtctatgcaaaacagatacacctccactagaaacctgaaaacaacatggaacacacactcccagcatccacatagcaggcatgaccaatcgatcccaatccatcagtctcacttcctctgagtttggtagctccacagtttgtttccatgcatcacatcagtcaaccactatcaatcctattatttaacacgcaaaagaaatgtctttttggccgggcgtgggggctcacgcctgtaatcctagcactttgggaggtggaggcgggcggatcacgaggtcaggagatcaagaccatcctggttaacacggtgaaaccctgtctctactaaaaatacaaaaaaaaattaaccgggcgtggtcacggcggacgcctgtagtcccagctactccggaggctgaggcaggagaatggcgtgaactcgggaggctgaggcaggagaatggcgtgaacccgggaggcggagcttgcagtgagccgagatcgtgccactggactccatcctgggtgacagagcaagactccgtctcaaaaacaaacaaacaaacaaaaaaaaagtctttttatcctctgcagtaaatacagcccttattccatcattttatggattcacattggcacttaattataaaagagtctgatgtgtgtgattccttagttcaattataaatgactggaggctaaggcctgtattttctcttctttcccctggatttttggctaagctgtagcctcttagcaggtattaaataaatacatacataatgaataaatgttgacaactattaatttgtgtcttctaaagcatactgatatgatcaccacaccatatcaaaacacgagacagccccttacagcttgaataactactttaggaatcaagaaatcagagctcttctgccccaggagcactgctaactagtcatgtggtccttttatcttctgggcctcggttttcctcacctgtaagaaggaacttgattatattatttctgagggtcaatattagggatgttcttcaggtttgctaggagaagaagcactcagattaccaggttgcctgtgggagtggagttcatcctccatgtccctagctgtattctgagttcctggacttcccagtcatggcctgatgccggaccttatggagaactggcacaacatttcctgccatggagtgtgactacccttctctgtgtgaaagcatcatcagtttattcctgtcaaacagactctgtcggtcgggtagagtttcacaacaaactctgttgaggcttttaacctcctgcatacctggcttcccatgattgtctttgcctaggacaccctggtctaatcagctagggccaaaacaatagggtcagtttcactcagggaatagtcaagccactttatgtagggaataactgatttgggtcatcattctcagaaaagggggctgtaggtgtggcataacctacagctccataaactcttttctctctctttctaaaatgttttatgagaattaaccaaatactgacaatcaatataaagagcattaagaaatgtgcagcatgaatgaaagattacattattcacttagcagtaatttaatctttctgcacagtagaaacgcatacagaaagacctagagaagaggctaactcacaaatggcaggaaaccaactccccaaaagactttttgggatccagagatcttaaacataatgtagtgttcctccagtatttaaaacgaaagaaatatttttaagagtacacagggagtaaaagtgttttataaccttctgacatgtagctaattcaaacacagcctgcctggtacgtgctcggccacagccagtaacaaaatctccagcctgtggaccaatccccagtcccctctcctaggatccagacacaagtgtgctttccagaatgggttggagtgtgctagcccacacatctcacttaagcagagaaatcaggggctgacccttgagtccaaggcctttggcaatggatacacttttataaatagaaagaaacaaaatatggcactatgttttcaactatcatttcaaaagcagatttaagaatgtcaggatcattactgttacacccagaagatagcacagaagatgccacaggatcacccaggcagcatttcatggggaaaggagcctagacttggctttcatacagccctaggattgaattcctattttgccttccccagtttgcaaaattttttgcaaagtgcttaatattaatagtagttaccattcatcaagcacagtaggccctccttatccatgggttccacatatctggattcaaccaacctcagatcaaaaatatctggaaaaaaattgtatctatactgaatatgcacagactttttttcttgttgtgatttcctaaacaatacattatattaataacaatgatttatatagcatttatagtgtattgggtattacaagtaatctagagatgatttaaagtatgggaagatatgcataggttaaatgcaaatatgacaccattttgtatcagggacttgagcatccttgcattttagtatccatggggagtcctgggaccaatttcccatgggtgctgggggataactgtactttattctgtgccaagggcatgatatgcataatgatatttactctttacaagaaccctgggaggtaaaaattattgggtctctgagatagtaaccttcccatagccagttaacgtgtaggagggaagccaagattcaaagccaggtctgaagctccttactgcctttcctattcatcctctctgagacttcatttcctcatttatagaatagctataataacacctcccttagaaaactgtagggagatttccattttgttttattgtaaacatgcctggaacatagtgattgcttaataactgttggctagtaatataaatgtatacatgaaatactgaagtcacaaaagggcctgctggccacagactggtttccttgatttccagtctgctatttatttatttatttttgagacagggtctccctctgtcgcccaggctggagtgcagtggtgcgatcttggctcactgcaccctccacctcccaagttcaagtgattctcctgcctcagcctcccgagtagcagagattacaggcgcccgccactacacccggctaatttttgtttttttagtagagacagggtttcaccatgttggccagccaggctggtctcaaactcctgacctcaagtgatctgcctgcctcggcttcccaaagtgctgagattacaggcgtgagccaccatgcccagccttcagtctgctttttaaaaacatttttttaagaagtctaattgaacattaccacaagcacaaaatgtagaattatatgaaatcgccccacatccaatcacacatatatagtttcccctccccagctttagtgaggtataagtgacaaaaattgtatatatttacagtatacaacttgatattttgatatatgtatacattacacatagttttttgtatattttcttctgctgttttcccacgtgtctttttttaaagattgttatagttttatattctttttttcttttttttttttctgagacagggtcttgctctgtcacccaggctggagtgcagtggtgcaatcttagctcactgcaacctccccccactgggttcaagtgattctcctgcctcagcctcccaagtagctgggattacaggtgcacgccatgacaccaagctaatttttgtatttttagtagagacaggatttcagcatgttggccaagctagtctcgaactcctggcctcaagtgatccgcctgcctcggcttcctaaagtgctgggataacaggcatgagccactgcacccggcctatagttttatattatattttttcacttagcattatcataaatatgaatatcataaataatatgaatactatgctacatcctatttatgcttagcatctttaatcacaaaatcagtgaaccattctggaatatttttttctcctttggatgagtttgggccctgtgtgagagaaatctagaatagaatcctcagctccaccacttatcaccacatgactttaggaaagttcttaactctctaagcctctgtttacttacttgtaaaatagggataatgattcctacatcagaggattattgtgaagattaagtgaggtaacacttgtaaagcccctatgcttttactattcacaataagcttttattaactctagctattcttaactagaggcttctccttcccccatccaaacagcattacttcacattttctgttaatcaatggctttagagaaatatgcttagagattacattggtttaagagagggagaggtgaaaggggagagaaaaagaaagcctgggagcgggaaggctctgctaggctctctgactgcacaccacacctgccttagaccttttcttgcaactcttgcaactgcaggagcagcaggggttcccaggctgaaattccattctcaggtagctcacagggcagatctggtcactgctgggatgtgtgggctgtgcccacctgctccctcaggcagcctcattccacactggctcccttgggatgaccgaagcctctgtggcctgggatagaggcagctggggaggtcagggcagctttctgtgttccgtgagagcttctcagttgtctgaaatcctcagccttcaaagtagagctgatccctacccagaaatgtgaaactgctgtgagtcaaataaatcattaataggcaagctgggaaagaatgggcagtaaagaagacaaagggtcaatcctaaccctcctcagaaggacggacttcacatgtgccctctacttccttactccattgcctgcaacacacaagatgctttttgctgcccaggaagtctccagaaacattccacacaattgagcactccctggttctggaaacactctattctcttggctgccatgatgtcatcctctcccgcgctttcttctgcttttctggatgttccatctctccctccttcgtctgccatttctcctctacttgacctctaaatgtcagagctccttacgggatggctttaagttctgtcctctttatgaactttccatctccctagatgacctcatccatttccatgatttgaaatatctaattctaaatttttatctccagctcagacttttctgagctctagacctatttgtccaataccatggatacacacatctccacttaaatgtctctaagatcttttgtaacttaacatttctgaaactcttgatcttaacaccccaatacacattcccccaaagtgtcccttcattcagtgctactctcctagtaaatctcagcgattcctatctgctcagtagttcaagcatacctgagacctagaagtcatctttgattcatcctcttccctcaccacgcccatccagttgatcacaaatctctctcaattcctcctctacaatatttcttgtgtcttcccactgtcaccgtcctggcccaagccttctcttctgatagctagctagctaatcaccctgagccctccatatggaaaccagggatcatttaaaaacatagtaaatggggtcatgtcactatcctacacaaaaatacttcaatggcttcccattgcacttaataatagccaatgtgtcaggcactttgcagagattatcatgcattacacaggtgcattatcttagtcttcacaaccctgtgattaccatcctattttacagataaggaaactgaggactggagaaattaatttgcccaaattgacaactagaacagtgtagagttaagatttgaactcagtcagtctgactccaaaacccaagcctctcaatcaccactgtcctgcctttcacttaagacaaaacccaaattccctaacataacctaaaagactctggcttctaccgcctctttagcaccatctccttctgcatctccatctttcagtgtgttctagccatgcgggtctcctttcagtgactctaataccctaaggggccatgaaaattatgtttactacaatttcattatagcacagggaaatggctaggatatgacattgaatgcactaaatgaaaacacataattgcttatatcatatatgcctgaatatgagcaactttgactattatacagtcccaagttatcctgatgaaaatattaaaacaattgagtttttatgggcaggtgatagaaaacttgaataaacttttagcaatggggatgatttttttttctaatgaatcccagaagagaatgctctttttagtagtcaaatcccagaagaaaatgctattttttagtatgtttaactgaaaaagcttatatttccacttcaatttaggaagttcttcttcttcttcttcttcttcttcttcttcttcttcttcttcttcttcttcttcttcttcttcttcctttttttttttttaagtggggccttgctctgtcactcaggctggagtgcagtgacacaatagcagcccaactgctgggttcaagtgatcctctagcctcagccttccaaacactgcattacagatgtgaaccactgtgcctggccttaggcaattatttttgacagaaggtatggaaactaatgttgcattataaagtcctcatcaaatatctcatacttaagcaaagaccccaaatcatagtttgtagatttactgcagctttcattcaaaatacgttttttatcatctgtcacacaggaaaaccctgatacctgatatcttcctatcagcctaaagaaataagaaacacaataggacagtgattatacttttaaatattagggagtttagagccccagatattctatatgcagaccactatgctcatgtttatgtcttttttttcttaagtgttagaaatgtttatttgtcaaaaaattatttaaaaatgggaggagtggagtaaaacaaggctaaatttcagctaatgctgtaccacgatcacaggtcagatataaaaaaacaaacaacacaacccccaatggtcctagcaatttcagaagattaacttcaatgttagagtccagaactaacagagaagagtaaaaggctgcttgccactacatggtcatttgaaagagaaaggagatgctgcaggtaggcagggagaagtattcaactcctagggaaagcaagataagaggggttccactgcacaggaaaaaggggatgccagcataatccttacctagggctgttcagaggctgagaatataaggaacagagtaaaaaaggctacagagactagtatcaggaggaaagaaaagtcaacttagaagaattaaattaagaaagaaaacatagttggtcacaaactccttttgtttactgaaacgtgaagcaatggaaacatcctggcaaaggggaccgcacggagcaagttctcatatatgcccgcagcccgagggttcagtcagcaattattctacctccagtttttaaaaggctgagtaccaggctcggtccatatagtgctcccgttcataccgggccatgtcgtgtagagaattccgtgtagctgctgaagcctgaaataactcactctctggcccataaccgtagccctctccaactgtggggagcatggctgcagcatgacgcggttccacaataggaggaagtggtggccggagcggcagccatagtagctgaagtggcagcagcacaagaacttggcaataggtatctgtcttagggattagcagaagtagagttgaggtggctggtcacagttgtactttggacttgaggcagatgggacatggtctgctctgcctagttacatgcagaagctgctgccgctgctgctactgcctcgtaagagcagacccagtatcgcttatagtagtggagtgctgcatatgcatcgttgtaatacctggattccccatagcccatggtgtaaggcgtgtgaactgctgcatattgttcattacactgctcagtaaagtctgccacacgacccgtacgatctactgggcactctttggaccagtgaccttctttcttacactgatagcagccacactggtctcccattccaggggcagtccgaagtcgggcttgtggacaactacacatgcattatcttgccttgaaactctgtgttgtcaaggcccctgacggtctcactgcgtcctctgaccactccatgtgtatgaagtgtatgaggacataatctttcacgatgtcacattcaatgactggaccatacttctcaaacttggcttgaagctcttggttggtacaagtgggactgatgttacccacgtgtaacttggttgacgctttgctcttattcttgctggcttccacgttgatgttcaccccatgaagcttgtaatgatgcaagttgtgtatggtatcctcagccgccgtcttgtcttctatgtgtacaaagccgtagttcttaatgatgtcacattccagcaccttccctactgcttgaaaagagagcggatctcctgctctgtggcctcctggggcaggtttctgatgaacagcttcatcatccggacaagcacctctgggtggcagcggcggaggtagctcctgcgtcagagagaaccctacaaaatcgtttgtcttgataaaagaaaaacttcagccgaattaaatttaaaagagtttaattgagcaacgaacgattcacaaattcggagccagagtaggatcagagaatccagcgcagccacatggtagaaggagatttatggacagaaaaaggaaagtgatgtgcagaaaacggaagtgaggtacagaaacagccagattggttacagctcagcttttgccttatttgaacacagttcaaagagttggctacatgtgattggtcaaaactcagagattggcacacgtgtgggctacggtctgtttacacctccacttgttatagttcattatgcacggagaaacctaggccaaaattaaaatatgtaaggaggcagctttaggctaaacttgatttaacaatcttaataagatccctgtccaaaggctcacatttctatagaagctacagtttttcaattccaaggataggtaaaaacagggcagcaccatgatctataaaatctagagttatggctcagagttagggccgtttcttggtgacattgtgatggtttagctggtctacaacaaatctatgagggcagaacttggaagtgttgactgccttcacggcatggaaggcctcagccctgtgcaccacagcgtggttgtgctcctgccccgtggtcagataggacacgcttgttcagtagtagttctcatggtctgcagcgcggccgccagtgcttccagatccactgccttccaggaatgccacagcaacagaggagggcagtcaggaacttggagcctggggctgcactcatcagacagccaagtcgttttggccactgatgcaaagatgaaatgtttaactatcttcttacaatatttaacttggtaatttagtttaaaatgcatatacaaaattgcaagtattaaaaaatgttatttttaaaaattgccttttcccactcacacatttcatgaaaacattttattcaaactttttaaaggcatgtttcatgtcagtgtcttccatcacctctaaagagatgttctctaccaattttcctgaccacctcatcttcacttctatccaaactatttgccacatagtacttttttcttaaaaacaaaaaaattattacaggctgggtgtggaggctcacgcctgtaatcccagcattttgggagactaaggagggaggatctgttgagaccaggagttcgagaccagcctgagcaacatagggataaccccatctctaccaataaaaaaaaaaaaaaaaaaattagccaggcatggtggtatgcacctgtagtcccagctactccagaggctgaggtgagataattgcttgagcccaggatttggaggctccagtgagccatgattgtgccactgcactccagcctgggcgacagagcaagattctgtctcaaaagcaaccaaaaaacaaaatttattacagaaaatttcaaacacaaatagaagtatatagaaatctcaaaaaaggccgggtgcggtggcttatggctgtaatcccagcactttgggaggctgaggctggcgggtcacaagttcaggagatcgagaccatcctagctaacatggtgaaaccccgtctttactaaaaatacaaaaaaattagccaggcgtggtggcaccacctgtagtcccagctactcgggaggctaaggcaggagaatcccttgaacctgggaggcagaagttacagtgagccgagattgtgccactgcactccagcctgggcgacagggagagactccatctcaaaacaaacaaacaaacaaaaaaataacctcaacaactatcaactcatggccaatgtttcgttcataatcctccatgccctccttcctgaattgtttttaagcaaatcccagatatcttatcatttcacccaaaaatatttcaatatgtatcccgaagagaaagctctttttgagaaatataactgcaatcacattatagtacctaaaaattaataatgccttcacatcattaaacatgtagcaagtgttcagatttccccaattgtgtcataaagttgtttaaattaggatccagactaggtccataacttgcatttagttgatatgttttttaattatcttttaatctatgggtgtcctccttcctctggctcttttttccttgcatgcaattcatttgttgatccgccctttagagtttcccatacctggaattttgctgactgcattcctgtggtgtcttgtatcatgttcctctactcccctttatctcctgggaaatagtaggtggctctggagactttatcacattcacattctatttattggcaagaatatttcttagcactttcatcaagaggctaattggttggttgtttttctttttgtgttattatagccattaatcatcactacctagattcactatttcagaaagggtgcaaaatggtgatactctgattctatcatttcttcttcatttattagctagaatacttctctaaggaaaaatgttctcttatcaacttttgattatcctaaggtgcagtcttcaggaaaggcaagataaatgtgtgattccttctttttattagttttcagaataatgggttggtttcctaacatccatcaagagtgacctaatgtctaggtattacttagttttctttttgggtgggcatgatggctcatgcctgtaatcccaaaactttgggaggccaaagtgggaggatcacttgagctcaggagtttgaggctccagtgagctatcattacaccattgcactccatcctgggcaacagaccaagaccttgtctcaaagcaaaaatggctgggcgtggtggttcacgcctgtagtcccagcactttgggaggccggggcgggcggatcacctgaggtcagttcaagaccagactggccaacatggtgaaaccctgtctctactaaaaacacaaaaattagccaggcgtggtggcaggcacctgtaatcccagctactcaggaggttgaggcaggagaaccccttgaacccgggaggcggaggttgcagtgagccgagataacaccattgcattccagcctgggggacaagagagagacttcttctcaaaaaaaaaaaaaaaaaaaaagaaaaacaaggctgggagaggtggctcatgtctgtaatcccagcactttgggaggccgaagtgggcagatcacttgaggtcaggagttcaagaccagcctggccaagatggtgaaaccctgtctctactaaaaatacaagaattagccaagcatggtggtgcgtgcctgtaatcgcagctattcaggtcaggtggctgaggcaggagaattgcttgaacccaggaaatggatgctgcagtgagctgagatcacgccactgcactctagcctgggcaacagagtgagactctgtctcaaacaaaaacaaaaacaaaaacttaattttgttttatcttatttgtgatatactactttttattttatacaggctcctggccgtggaatttttattataagctacaaccaaccagttataaactatcaggatagttgacctttttttcagtagataatcatattttatcgacagatgttgaatttttgagatagaattcacataccacgcaactcacaaacgtaaagtgtacaatccaatgttttttagtatattcacagatatatgtaaccatcaccacaatcagctttaaaacattttcatcacttcaaaaagaaatctccgtaatctttaactaccacctccttatctacccatcccctcccccaggcccaagtaacctatgatctaatttctgatctgtagagttccctcttctggactttcatacaaattgaatcatatattatgtggtcctttgtgactggcttctttcacttggcatgatatgttcaagggttatccatgttgcagcgtgtatcagtacttcatttctttctacagccaaataatattccactgtataaatatacaacatcttgtttatccattcatcagttgataaatgtttgggttgtttccagcttttggctattatgaatatagttgctataaacattcatgttcatatttctatgtggacatatgttttcattttgcttgggcatatacctggagtagaatatggtaatactatgtttaatcatttgaggaactgccagactttttttcaaagcagctgtaccattttacattcccactagcagtgtatgagaattgtgatttctccacatcctcaccaatattcatggttatctgactttttgtttccagccaacctagtgggtatgaagtagtatcttattgtagttttgatttgtccttctgtgacttataatgctaagcatctcttcatgtgtttattggtctcttgtacagctttcttggagaaatgtctattcagatccttttcccatttttaattggataatttgtcttttttattgagttgtaggatagataatttttctcatttgccacataggtatgtattaatataaccacttatactttttaaagtaatttttttaaacttactttgaaaatgtaaccaggacttaaagttgtgtagtaataacctcaggattaattattgactccatattaagttttttagtaacttttaaatattccagcagatgagctcaataaacgtgaagaactaacattggctgaagtttttttcaaactaacatgtcttccctaaacaataagttgttattcaaaacaaaatattgagaaggaaacttctatagtgtgatcaactttgtaaggacttgaacatatggtgactcttttctgaggaatatttttacgaaaatcctgtcttttattggatatatgtggtacattacagaatttacaactgtgttttaaaataaagcccatgtagcccgcattattggatgacattagtccctgtgcattactgctgggttgtgggagattgcagtgttaaatgacatcacacaggaagtgtttaacacagtctacgacctgcctgtgagaatatccttcttcaacttagactccagaggaaatgagtctttccactgaaaggtgttaaacatgtccctcccacggttacagtgctcaagagaaaactgactgggcagagagattatagccccagggagagcataggtgaatagcccactccagccagcttagtggtcagccatcgcacttagcaagggaaacagagctgacacatcacatggcttctggtgaggtccatatatagcaaggcaacaggccacaagcagttttgtggactgctggaagaaacacatgctggaaaaaggttaccactagttctttgtgaggaagaactagggtctggagtcagatgtcactgttcattttttgtagtttgttgcatgtaatcttgtaagcaaactctagttcttttcacaatgagcggattggtcgttctcaacaaattattgtcttcctcaagttctaaatttaaaaagctctttatgtatagataaattaggtagaccacaactaattgttaagtcaagattctgtttttgccatgatcaataatacatcagcagcctcccttacaaaattactaatgcagccacaaggatgtattactcatataaatattgtattgtatttatttatttatttatttattttggagagagggtcttgctctgttacccaggctatagtgcagtggcatgatattggctcactgcaacctctgaccccagattcaagtgattcttgtgcctcagcctcgcaagtagctgggtattacaggcacacgccaccatgcctggctaatttttgtatttttagtagagacggggtttcatcgtgttggccaggctggtctcgaactcttggcctcaagtgatctgcccgcctcggcctcccaaagtgctgggattagcatgagccaccatgtccaccccagaaaatattcttaatggaaatacaccaaaacaatcgtgttagtatattttgaatgggggccttataataagagtatttatcctactttttttctatttttctaattgtacataatgggaattttttaaaaaatgaaaactaataaaataaaaaataaagcttattcctaaatgattcaaatttgttagtttctatagtagtgctttccacccttgaaatattgaccaaaatagattacttccagtccaaataattaggttatagaaaaacattaagaatttgtctatacaacattatatgtgttgaggttttacagaactaagccctttttcctcacctgagtttaagaccaactgagagatagacacaagagtcagacagttgaagatcagaactttatcttgggccgggcaccgtggctcatacctgtaattccagaactttaggaggcagaggcaggtggatcacatgaggtcaggaattcaagatgagcctgatcaacatggcaaaacctcgtctctactaaaaatacaaaaattagcccgatgtggtggcgcacgcctgtaatcctagctacttggaggctgaggcaggagaattgcttgatcccgggaggaggaggtggcagtgagcaaagatcgcgccactgcactccagcctgggtgacagagtgagactgcatctcaacaacaacaacaacaacaataacaaacgaaaaaaaaaaaactttatcttgatcgctggtaaagctggattggagaacatggttttaaatctgtgacttacattttgccccaaattaaacgtgtctgcttggtcacaggaagagttggaaagccacaggctctcttcatagggatggaacgtgccccactaacaacactatgcagagaacagactaaaaaacatactctctgcaggcagccaggctaacagggaagtggagtccaagaggctgagtcatgcatgcccagttcttatgcccaaacaccagaggtagcgggggtaaagagagaccagggatgttactttaagaaaagaagtcttccattcagaactataagaccaagggaaatgaataatcctaacccacctgaagcaataataaatggtaaaaactccagccaggtaaccagggccatgtgatcctaagaaatagttttgagtggttgtgttttttttgttttttgtttttttgacaaagtctcactggttgtggtttatttgtttgtttgagacagggtctcactctgtcccccaggctggagtgcagtggcatgatcttgcctcatgcagcctccacctcctgggttcaagcaattcttgtgcctcagcctcccaaatatctgggattacaggcgtgagccactacacacagcccattttggctatttttgaaactaaattgattttaaaaattaggggttcacataaatggcaaaaaaaaaaaatcattaagcagaggaacctgttgtattttgaaaaacaaataagagctttcttttttaaaaatgtgcaataatattttcacttgatttatgcttctttcaaattccacaaattaaaaatgacttgcaaattaaaacaaaaattagaaaaacattgtcatgtctaacagaattctctctcccttctctaaacactacttagccagaaacagagaaataaaaacttctataaaagagggtagagaagctgttgtttgttctttaaaagttaattcagtgtgcaaagctggtaaggaaagcccatcctcttagctggagttgcataatcttcaaagaagagtccctggagagtcataaccagaaatgttggttcaacacacacacttgctgtgcaagactcctggccttcatccagactccttgggacaaggtgtccacatgcacctgaatgccgccaaggagatgccaggtaagaagattttcacataggtatttcagtgtacaaacctgttgcaccacatgtgcccactcaggtattaaactgaatccctttccacactgcaatgtgactgaacctgaggaaaataatcttccacaccaggcacaaatgaatatttctgcttaggagcaaccagaagtccaggagtgagaacagagttctccaaggcaattgcctctggcagccacaggctgagatacctggggtctgtctttactgagagaccttgaaacccttaagcctcttttggcctctattttctcatcgcaaaaacacggaggctggatttatcaggtgggaactgctttaagattctatgatactttagtttgtttctatccaaacattctcatggtaatccaataaattaaggtgaaatttattgcagtgattgattattcagttaaagccaattcaaaaaaaaaaacaaaaacccgagtttatcactatgcaatatgtccatgtaacacatctgcacttgtactccctaaatctataaagataaaaaatatattaaaaaaacaaaaaccagccaggtgcggtggctcacacctgtaacctcaacactttgggaggtgaggcaggcagatcccttgaggagtttgagaccagcctaggcaacatggcaatacctcatctctacaaaaaatacaaaaatagaggctaaggtgggaggatcgctcactcgagcctaggaggttgaggctgctgtgagttgtgattgtgccattgccttccagcttgggcaacagagcaagaccctgtcttaaaacaaaaaaatgaaaaaacctgtaagctacacttgtgtgcaagcacatgcctacacacacacacacacacacacacacacacactctctctctctctctcttcactcttaaaatacggggcttgaaattatttcagttgtttgttcacacaggcccaaattgctcaacactgggtttcatgttgccgctattgacatgttaattgtactggattgttttctgtcctctcaactgtcctcatctctctttaagcagaatggatttctaaacatgggtcctcaaaacaggatggtggagccagccccacatgcttgggggcatgtaagagctaaacgtgctgatatgctgaatatgtgcctgaaagatggatgtgacacaaggacaataaacagtggttgattgaaggaaaaattcctgaaaaattgaaggcaaatacatctttcactaaacagaatcaaattttatgtgttgtaggacaagtatccaggactacattttaaaaatgtaaatgtaaaaagaacactggatttaggtccaaattcatttctgctacttactgtgcaactttgggcaagatccttaagcactgtctctgagctttggtttcttctctaaaagtgtagattagacacccacctcaaaggaaagggtggttgtgatggttaatactaagtgttaacttgattggattgaaagatacaaagtattgatcctgggtgtgtctgtgagagtgttgccaaaggagataaacatttgagtcagtgggctgggaaaggcagacccacccttaatctgggtggacacaatctaatcagctgccagcaccactagaacataaaaagagagactggcctaacctcccggactatatctttctcccatgctggatgcttcctgccctcgaacatcggactccaagttcttcagttttgggacttggactggctctccttgctcctcagcctgcagacggcttactgtgggaccttgtgatcatgtgagttaatacttaataaactttcctatatatatatatatatatatatatatatatatatatagttctgtcctctaaagaaccctaatacaatggttttgaagattgaataggaaactataaaagtgcctggtatagtacttaatatacacaaaagtttttatttggatattaaaataattattttatcatttgagaaatctttttgaaatgcaaataataattaatgctgattgattgatatgtgtgtgtgtgtgtttgtgtgtgcgtgtgatttttaaaatggagtcttataaaaattttctccagataagacgtgttcatcattctgtcacacagggcacccaccactcagagaaaatatccatcctccgcccctccacacacatcaagttcttatccaaaagaagtttctcccttcctttttatgccaacatggttagctcatatttcctttactagtgaccaatatcattttacctatctattttaggatagcttttccagaaactatgaaaggcagaagaaaattcctcctgtttcaaagacctacaaagcagtagcagattcaccaacttctgctgcagatgctacaagaagcctttattcactgtctcaaatgcatttttttttcctgctttggcataaccctgcaaaagctaaggagagcaagtgtcctcaaaagaaagggagtgttaaaaccccgtttaaaaaaatacgaaaactggcccgtcgtggtggctcacgcctgtaatcccagaaatttgggagaccgaggcgagtggatcacttgaggtcaggagttcgagaccagcctagccaacatggtgaaacccgtctctactaaaaatacaaaaattagctgggtgtggtggcaggcacctgtaatcccagctacttgggaggctgagacaggagaatagcttgaacccaggacgcggaggttgcagtgagctgagatcacgccactgcactctagcctgggtgacagagcaagacaccacctcaaaacaagcaagcaaacaaacaaacaaacaaaaaaccacttcagcttctagcgtagtgctggacatgcagtgaaggatgccaaaaagtttaagaaggaaaatggaacaagcactgtgtctacagtcttcacaactgagacttagtttctcttcctgcagtgtaaatataattgccctccctgtctccactggttattgagaggaccacatgaccatgagtagcagcaatacattacctaagttattattattattgttattcatcatgcattcaacaaatactgagatcactgttctaggctctggggatatagcattaaatcatcagactaagatgtctgcccctcgtgcagcttcctaagtaattgtaagatatttttagtttgggaatagttctaagtagaaaataaacagagcaaagtaattaaaaacaaaacaaaacaaaacaataaacagggtggagatgggagtggttctaggttagtcagtcctttttgatggggatttgggagctgagtcctgagcaatgggaaagagccaatcatgaacagatgtggaggaggagcatctgttctgggaagagcatctgcacttcttcatgcaggttctgagttgggcatgagattgacatgtcaatggactagaaagacagcccatgttcttggagcacaatgagcaagggagagggacagaggatgaagtcagaaaacagacggaaaccagtgcatctaggtcatggtaaggattattccagaaatctgctgaaatgcagatgttcctgtttaattgccttgacacacaataggcacttaacaaatatttatattcattgatttcctacagacataatgtcttagataaatatgtgatctaacagtcatctaattgaccagggctctgagcaaatggcagatgtaccagcatagcctttttaaagaggacagtaatgcaggctgcattccagggagcagaatccagaggtgggcttctcatctgtaatggattgaacgtttgtgacccccaaaaattcatatctttaaatcctaacccccaatttgatgatggtatttggaggttagccttggtcacgaggatggaccgcttaagaacgggattagtacacttttaaaagaaacctcagagagctcatttgcactatttgtcatttgaggacatgggaaggaccagaaagaggccctcatcagacaccggatctggcagctccttcatctcgaatagcccagcctctagaaccgtgagaaaataaatttctgttgttcataagctatccagtctatggtattctgttataacaacccaaacaagctaagacatcatccatcttggaagaaaccgctcctatttcactgtaaattgcagattccaccaacaccctgccaaacaccaagaactgagctcaaggttagtgtcatgtcttctgggtgccaagacttcgaagccatctctggggagtgtgggagggaaaaaaccaacagctcaagacccattctctactcctttctagcaatgcaactttgagcaagtgaattacctagtaacaataaaggtaagtgttcatgtagtgctttctatagggcagacattgttctaaagaccttgtatgtattatctcattcagtctttaagaagggataataatagtgcctacttcataggctgagatgtgaattgcaaatcaatcaatgtttgttccctccccctttttctgtgaagactaaaatgtctgccttcaaaagcactagaagagataacgtgtatgaattgcttgctcgatagtgggtgcccaacatattatagctataataataatgatgttatcaagtctccctctgtgaagccctagtttagctggggggtcaaagccctgctgaatgacttgcaaaagtcaggtatttggggtatatcttgctgctaacttatcctagagactgattaagagcctggagcataatcaatgcttaacaaatattctttcctctctgctgagatccagaactacctgaaaaggtagctcagagaatacaacttagtatttattaactgtagaaaagaagatcgggtgtggtggcttatccctgtaatcccagcactttgggaggcctaggcaggaggaccgcttgagcctagaagtttgagaccagcctgagcaacatagcaagaccccgactctacaaaaaataaaaaattagctgtggtggtggcatgaacctgtggtctcagctactcagaaggctgaggcaagaggatcgtttgagcctaggaggtcaaggctacagtgagtcattgattgcaccactacactctagcctgggtgacagagtgagaccctgtctcaaaaagacaaaaacaaaaacaaaactttaaaaaagaaaatctaaacctttgtttaaggtgttactctccaatgttcaaattcatgcctcagcagagaatttgacaatcagaacatgaagaggggtcctggcacctctgtcagccacatcaggaccggcctgagagtaagaggcaataacagtgtcatggccaagcagaagaaagggttaggggagctggctaagggagatgggctcaaaacagtgagaatgacaccttgtaataaggcaaagaagtagagagtgttcataagccaagatttcgcaagcaagatctgcctgtgtaacagtttatgaaccctatattctgccatacatactgtaccatatccaacaggccccaggggataagagttgagggacccctcatatgcctcccttaccacagcctgccacaagatctcatcttagaagagggacattttgaggctaatgtctctatctccaaagacctctgtgaaatgccaaggtctgacttgagagaggtaatacatctgtccattcacctacccacaaatcagtgtgttgtcttagtagataagccagctctcatgttaggaaactaagagtagagttcagagataggacacaaatcagaaaaaccgctgtcagttctaaaacaggccaaaaaataacaataaatctgaggtttaaaaaaaaatcagaacaatggttgcctaggggggattgactgagaaggtacaagaaggaatcaggggagggggaaattctatgttgtgatagggagtaagttacatgggtgatgtatccatttgtcaaacttggaccgctaagagcccaagaactgaatatttcaatgtacgtaaattttaccttaaacaactcttaagaaaaataataatgcaatggaagagtggaggaatagataatatagagatggcagaatgagatgggtacatgagtgttcattatactattggatttactttgtatatgtttagaattttccatgataaaaaagctaagaaaagtcttaggagcagcagcaggtaggactggggaccaggaaggggctctgtgggatgaggaccgacacagtcaaaggactgcatggggaatacacaaaaatgttggggggagggaggaaggagccttttgtcccctgcacatttcttgtcaaatttaatcccacgtgttatatatgcttttgccttatgaatccaatctttttccatttcattttctaactgcataaaagaaagctaatattttcatgtgtttgcacaggccactgtattaatagttacaagcttcctaagaggagggcaactagaaggttacaacgtggtttaaatgtgtcccaggccagccctgctcataccaagtgagagaacttcagaggagagggacccacaaacctaaactgaaattgcttaagaaacttccatatgtagattgttgtattcccagaaatgattctcatcacacaaaaaaattggaggttggggtaggttagtgaatagtcttcatgtgtagatagatttctccaccaggggatagagctgacagaacgaggcctgcaaactcatggaaattagcagtaatgagacataaacagtcaaacctcaaaataacatctctggcctttagaatcaacacagctctcctgtcagcctgcacctggcccgtccggctgggtctgggagccagtggggttttaggccccttttaacagctgccaaaagcacattactcatggccgggaagttggccttttatgttgccacaagtggtgcagccgttgtttggacctggcggagtccattgtaggtttttctcagggatggggctttgttctttgatttttccagaagctctagtttgttcaaatgttacccatgtgcagtttgcaagccccccatgctcctgtgctggcctacagccatgctcactgcctggcagcatcctccagcccctggagaagcagggcaagaggctgaggttagaacagcagaaggttacaacctcaccctaagaaactgtttgacctgccttgtcagggtccaggttcttaacacagtgcaaagagctgggaggaggcaaattaacacaaaaactgcctcttacaggcatacctgtgaaactacaaaaaagcctaattgtaatacctctgtttgaaatacacccttgaaataagttggttggttggttgagtggttgggtgggtgtatctagttaaaagaatccctatatctatttagttgataagatcttttctgggtttctaagctgcagatcagcctggtgcaaatggatttagggtgaaatcctggtggaggtcattagtatctggtgatgatatgctcacaatattttagtgtaattatttgtctactatctatttccccttttagactttcagttcttcaagggaaggagttgtgtctatcttattcactgctctatcttcagggtctggctcagacaaaaccttcaaaaaaaaaaaaaacataaaactctactgcatgaatgaatatgttgaatcttgagagcttgtctggaggttctagcaggggagctcagctactctgtacccttgaccgaaggccggtcctcctctgtcggagatggtcatccacttcaactgagcgcacagcttcaggagagaggcacatggagtgctgagggaggaaggggacacctgcctagccagccagatcagctgaattaatcctggtggtcaataagatgacagatgtcacagccagatcacccttgcatgcaaatatgttgaatctttaatgttcaagttgttacagcctatgatggcctggaggcatttcatactacactgggtcccttgtggcaaactttgttagctgggtatccacagccatttctttcttttctttttcctttctcttattttatttttttgttttttgagacagtctcactctatcacccaggttggagtgcagtggcatgatttcggctcactgcaacccccacctcccgggttcaagcgattctcctgcctcagcctcccaagcacctgggactacaggtgcgcaccaccaagcctggttaagtttttgtattttttagtaaagacagggttttgccatgttggccaggctggtcttgaactcctagcctcaagtgatccacccacctcggccttccaaaatgctgggattacaagcataagccaccacgcccggcctatcaacagtcatttctatctcctttctccttctcactacagaggttggaaagcacccttgcagctaggggtagccagttctggccaataaggcttaagagggaaactgctggcgtatttctgggagagatattttgttttctgattaaaaaaagaaaaaaactcaaataaaatcactttctggcattgccctttcttccttcttcttgctgtgaatgtggactgtaaagccagacactgtgacagtcatcttgcaaccagtagtgacaagcatgaagaggaaaatgcaacacctaactaaggattgtagaggagaaataaaaatattctgggttattgggcttcagagagtcactgaatcatctctggaaccacctacctccagccttcttattaagtgagataacaggaacatctgtaatgtttgagtcacaattagtctcattttattttctattacctgcatttgaatatttcataactgggacttttcttacttccacattagatacatggacagcgatggtgttttattcagcttgttattcctgcacacctagctcagaacctggtacatagtaagagctcaaatattattaaacgaatgaacaaacaaaacaggaaacaaataaaaagggattcagaagtttatttattgctcttctattatatacaaggcactgctgatcgctgagtgagggctgttcttagaatttattatttacttgcatatttaaactatagtatttataaggcattggttacaaactattgtaattcttggctcttgtcctttgatttatataaattatggtttatcaaagtacatgctgtttgcttattttcttaatgcacacatactcattcattcttgaagctttaagaaaagtaacttcctctatttcctctattatgtttattagcaaaccctttttatgaaatatggaaactattttttcttctttgaaattagttaaaattggttccgctgaggattgtcaaactctggctgtttgctgacctcatttcatgtagagcactagggtatacaccatccatggggtttcaaaatgtttgatgtttgaaacttttaaattaaaaagaaatgtggagccttgatcaaatggaaaggttttaaatatatctaaagcaaattgtaatgaagcaaaatgtatacttgcttacagtcaatgacccatgttagaagaaggtatgaaataaaaaaagaacagtaataatgcaaatattatgttaataagtctggggattgagtttgtgggagttataataaagtttcttttttcctttcacgctgttcttcatcagagctccagtgaaacaagagtaataaaatttccatcaacaggtggcaacacttgtattgtttgctttttagagtaggccttgattgcatttcagaacaaatgcattgatagttggcaaagatgaatatgatatttttttaaagcaaccaaatccagaaataacctcatgcaaacataaaatgaaaactgtgacagaagaaatcatgaaaacaaacaaacaaacctaaaccctagcactacttgtgaacatggcctgagaaaccccacgggcatgtccttaagcacagaacgacggagtctccctaggctagaacaacccagaagcccacagtacaagggtgaatggtcactcaaccagagatataaataagatggaataccctttagctattaaaagtgttgaagtctggggtaccctccaagtcatggaaatgtgtatatggaataaagtgaagtgaaaaaccagaacataaaactctgtgtatatgcaggttacagttttgcaaaaacgtgtgtgtgtgtgtgtgtgtgtgtgtgcgcgcgcgcgcgcgcgcgcgcgttgacaatgatgggagagaatttggaaccatatcaatagttttacgttgagccagccagttctttttatttttttccccctgtggaatttgtttagattcatgatattaaaaaggaaagaaaagaaaaaccatagcactaaaaccagtcattgtaccctgaaagagttgtcaggccttcttgagttcatggaggtttgcaggttcagagagtccatttgaagaaagcagagaagcatgaagacaaagattccgtttttgtccctgaaaattttgtggaggctgttccccgtccttggcaggcctctgccttcttgtttcttcacactgcagtttagatagcagggagaaccttgtctgtttaataagtttgtgaacaaagcctgattgcttcccttgtcaataaataaacattatctgcttctgtttctctgctaaattgagtttttgcttaccctaactggttatataaaggctttatgtacacaggaaaaagaaatgacaaggttgtgtaagcaggcagccctgggtagagttgtgaagtcagtacagtttatttctatgggctccttcttcttctttatgcatactttccctctttcaaaggcccagatggctcctgaaaccactatgctcatcttgcatcaacctcgtaaggaaccaatggatttcttcccaggattctttaaatcaaaacaaaagagggactagcccaaggaatgatcactacagactgaattttgggcatggaagtgggtttatatttgagaatgacaatcttaagtcataccacataggcaacagtccttgtaaaaagccagaactgaggaacaaacctgaggcacagtttaatttactggcttaccaccaaacaattaaaaggaggtaaactcagtattagaagctaggtctgcggaaagcagaaggtgcaatgagaggctgtgagagttcagaggaatgaggatgaacctctctttctcttcccataggatagtggagcctggacactgtgcccataaaatgcctcagaattgttgctggtgtaaggcacggtatggtaccaacaagaagggagaggacaaaatcctctgattttgaaataatgagggacaaaggagaaaactactcacaccaatgattcaaagctaggtttcctctgaaatgtcatcctgtaatgagaatgatgttaaagtccaaaactttctcaaaagtaaccacaagaaggtcagattgaccagacagagtgggtgctttggggcccatctgctcccaaagtcattcatcagactcaatgctacttctctctatgtgcagggctgccattggtctcctgaaaacccataagaaatttttgatctttctgttggctcaacaattctgatttttctgcctggcttattgatagtgattgctcacatttcaagtaaaaactgcaaaataaggcatccagacttgttgcatcacaaggcaggaaaagacaattactgaaaatctaaagagagatacgtgactattctgcaacaagttccttagctctcccaagatcatggagcagattggcagcagaattggagagaaactgttttctgtactgtatgcctcactcactcatttacctgagggactcaggttttgaggtaatagagatgccaaatccttagcactttactgtatagaaggcagctccatagccttcaatgtcaggaataaaaactcattcaaacccctctaattttaaagattttttcagcccccttttttcatctgaaagttgtattgttgttggcccaaacaccactttttgattgcccttgctgcttgctgtgaatgcaatctctaaagcactctgtttaatctttgaatcagctcaggaagatggaattaccatccctggaaaactgcagtttagtttcaaggaacccgctgcagctgcaacaataagatggaaatgtggtttggaggaggcaaggattaaaggtatgggattaggaaacccttgtttgccctagtgagttgaatgaccacataaatcacaggctaaacttggctctgctcagctcatattaaagtatgtagcatcagagcctcctcataatcaggatttgtcatcttgagtatcaggatggaagatgcagatgccaaagaggggccgggggagaagagaggatgagaaggaagtgaataattttggagacagtgactactattttgataggaaccagaatgtctgcactatttcaagaaccacatataaggacaaaagctgttggaaatgtgccttctaacttcaaattgcgcctgaccattagaacgctgataagggttggggggagagcagctggaactctgcaggctgcttgggtttcttttcgtgatatttattcctagatcacatttgcagctgcttttatctgctctttagaagttcttatatttggggaatcattcattgtgaaataaaaacctattcattgacctggaaatgtgatttattagtcagctacagaactagttgtctattaatgcaaacatatggaatacggaacttttcattctacccaagatgccacttatggaccctcaagtttatcataccccgtgatgcccccatattagtgccctgggctaagacattgaaaataatactctcttcaagagaaagtaaaacaatacacacacatgcacacacacacacacatctataatgcagtaatatggacagggaaatgggaagaggtttttgaataagaaccaaagccgtaaaagaataaccagcaaagaaaagacaacatacaaatgcagttgtaaaattaaggccgttaagaaataaggcatagccagatcttcttaaaatggggccaaagcacattgggatttgggacaacaaaagaggaagttagggcagggtagaggaaactgactccaggatagctatggcatggtatgttaggacacagcaagcttaggtgtgctatggtaccagctggcccaaaaccagtaggcaaggcaaggtactgagaagttccaggcagcagtggtgggtggttgtgtggtgacagtgagaactgcaggggcatggggcccgaatgcagactaggctgtgtaagggccacagccaggcaaaatgaagtttatagtgtgtcctagctctatgcagagccaggagttctaggcaggataaccaagcagatcaagctagaatcaagatatctagatgggcgcagttctgacagaatgagggtgatgagatgatacttccactttagggctacattaggcctgtggctcaatctctgaatgtgagatcatgctggcaatccaactttatttcaaatcatactggagggcagagctgaggctacctgtcttgttcagggttggaccatgtgttggccctatagtgttatttgtctgctcaacagtccttcctttgggaataacttttctgtgattcattgtggtttgggcattgccctcccagtgcaaaagggtgggactatgtctcagatctggccagtcagattcctttattccccaacctacagtgattaatccagagatacgcatatggcacaagctgagccaaatcttctatggaaggtcttctcctactactagtgtttattgagtgcttaccctgtgctgggaacagtttaaatgcttcagatgcattatctcatttaattatcatataatttgataaggtaatgctattattatcacccctttacagataaagaaactgaagcaaagatagagtaacttgtctaagatcatacacctaggtggtagagatagactgtgtaactaggcagtcttgtcccagagcttgtgctattaacatgaaaggaaagacacacttccctgctctaggattgtaaactataatgatcacataacataagctggaactataagtgtccacgttcctaggccacagagtgggagctgtctgcagtagaagagaatgaggccatatattatgaaaagaagggaaagagatcctcatgatatggtttgagtgcctggatctaggcatgcctgaagctattcaactcatggacttttcggttacatggaccactaaactccctttattgcttaaactagctagagttgggtttttgtcacttgcaaacaagagtcctgactaatacaggcttgtctgtagggtacttcagtatgcagtggggagcctagagaagatgagaacaggagaaatgagtcagaatgtgttcaaagcaggttggcatcctacaacacgcatgccattgttgtggcattccacggctccagttgtccttaccttattattgtgccctgcttcagttgacggtctataaaccaactgtctctgcacagacacagtccactggagagaaatctaaagctaaagcaatgcaaggctatcacctcaccaggagaaaatgtttactctgccttatcaatacctggatttatagcatactgcaaataacctgtagaatgctggttgatcacaaaaaggccacacccaagaaactgtgaaaaaacaagacaattgcaaagcttgtgctttaaaatatacctatgcatctcctttaaaaggttgggggatttggcaattggatggttagttagtccctcaggaatagctagacagattcaatagttattccacctttgactagtttgaagtatcctttctaggttcctgcactgcagagcagtgagcctttgtgtggcttggccttgaggttaatacaagcgaaactcttagagctatatctggcacatagtaagtgctcattaaccaagcaccattcttttcttctcttcttggctttccaaagattctacaatactggtattacctttccaattaaaaaaattataataagttgctgattctccccaaaggaagcacaaattcctcacttggaaataattccctgcaaaactggctttatggaccagaagcaatttctaaacctgataacaggtttagaatgaggggggctttaacaactgtatggactactgggagaagctccaatcaatattcccacacatggacaagagttgagctgaaaaagatttttaattcaaaggtcaaagcttgacaaacaggccgggcatggtggttcatgcctttaatcccagtactttgggaggccaaggcgggtggatcacctgaggtcaggagtttgagaccagtctggccaacatggtgaaaccccgtctctactaagaatacaaaaattagccaggcatggtggcagatgcctgtaatcccagctacttgggaagctgaggcaggagaattgcttgaacccgagaggcagaggttgcagtgaactgagcacagcattgcactccagcccaggcaacaagagcaaaactccatctcaaaaaatgaacaacaacaaaaaaaaactaactagagaaactaaggcaaatgaatgccaagagtcacacagctgatgagtaacagtgttgtgattcaaagatcaggttgggagaccagatgtgctggcccatgcctgtaatcccagcactttgggaggccaaggcagaggattgcttgagctcaggagtttgagactagcctagggaacgtggcgaaaccccatctctgcaaaaaaattagctgagtgtggtggtgcaccactgcagtcccagctacctgggaggctaaggtgggaggatcacttgagaccaggaggtggaggttgcagtgagccaagatcacactactgtactccatcttgggtgacagagccagaccctgtcataaataaataaataaataaaggaataaagatcaggttagtacaattaaattgtgccagcctcttggtctcccttgacaatgaaattaattatatccctattttttagtgtgttataatctgagttttaaaatctgaattaattatcatgattttctctgtcttcccataaactcacttgaaaagcagaaagtgcttggtcagcaagaaccttcagaactttgtagctgaaaggaagtttagaaatcaaataggggtgaggaagactggattaaacagatgtctttaccgtaggccttctcagagtctttgttgtgctagcatgcactttgattctccaatatataacctttctcaaacttatttgacaatggaatcttttttcctcaaaattattaagatcttgaggtgtcctgaacaacatgtaggaagtggtataataaatctctagtcccatcctgggctcacattttgttctgtaaatcctaattatgtccctgtaagctgaggcctagagtgacaaatccttcatctcaactccctcactaccctggggaggaggggaaggcggttgtggggggaatgggaggcctactgggaactccaggttcctgttctctcaggccctcagcatgtagggagggagaagccagaaactgcagctgccgccccaggcccccaaactccattcccttcactgtagctttgaattcctcccatgtgtaattataaagtatgtgttcagttatttactttccctgttccatgcagagtgtgttactgaataatacagttcacaagtaaatccaacttttctgctgcaaggtctgaattaaaaagattataaccttctatcattccagttttaaaagaaaccactacttatgtagcttaaaaaaaaatggaaacaatgattgtctgtcctctcagaaatgcaagcaaaattgtagaattaagatgtttacatggattttgttgtttctaacagccttaaattgcctcatttaggaagggtaaaaaataaaatgcccatgtttcttggatttccaggaactgagtctggcagccggttcactgttgtcttctagaatttgaagcaagaaaaattacaaccaaactggtgtcaatttgctctatttatcttgggaattaacttcaaagcttaattgtcagagacagtgacctctatactcatgaaaatccccagggaattacaaaagcagactacttgagtggaatgtgaatgtcattctgagaacaggcctgcacagcgcctgaaggaaaatgcttagcccaagaaggatggagctgaccctacaagcttctgtacttcatttctcaacactcagatcaagttcctaacccacagcttctgtctgacccatgtttctgccactgagctggttccagaattgcctgtggatgtgccctgccacagagagatgaggtatccttgaaatcggctgagctcaagtgcaaccactgaccccactccactcctgaagacttccaaggagatagtgcagtggccaagggatgagctgaagtagttctgcttgtataggaaggcccctgggcagtgttttgtctggaaacttccccttaatctggcagaatttggaacaaatgtttggctgaaaccatatactatcaaattaatagaacaattgtaggatagagaacaataagtcagaaaacaaaaatgcaagcacacagctcataaagtctactttatggaagtaagtagaatgctgaaaaagtacacattgtgctctgtggaataaccactcctaccccgacccggcctgcgccagcctgatccctcatgcacataattaaaacaaaaggaagaggagaagaaaatcatttgagcaaataatgtccaagcctctgctgtggtcagtggtaaacccagatacccagcagataacatcatggttgtaatgaggtaacagtgaacagccaggagaggcactggcttttgataacagccatttttgttaagtacaaaaaactttgctgactggccccgccctaaatcattgccttgtaagaaaggagccctgtcagaacaaaaacaatcatgctgtactagatgactctggaatacacaacaatctcctttcctggatatgtcagtgcaacttaagagccccaactgtggttaagtatactttcttttactctaaaagatagagctccttaattgatttcgccttcactaatgaatggtccctcttgctccaggaatgttgttccttttaaccaaagcacaattttgggtggtactttaatgaaatgatgaggtaagtggagacttgcagttagcaaaccagataatccaaataaattctggtagtcagataccgaagccagatcaacgaaatgcctggatccccaattgatctaaacaggcctccaggatagttcactcctgatggtaacaataattaacagtggaaaatggaagagataatttgggaatcatgcagagtttatcatctcagattgggagcaagtgagaagccaatgaaaggggaaaaaaaaataagagaaaatactatgagtaggaaaacagtttttatgatttggcatctaagaaaaacaaggtagttgggagtaatgcttactgttttctaagatttatctattcttagttattcctaagcaacattttggatcaatagttctcaaacagccaatttaaggacccatgaaggctagtcattggaggaggtctttaaatatcaatagctggattcccaggtctagctctagagcaagtcaagtatataaccagggaaacagtactccccaggtttagtagataaacactcgactttcaaaaacatttggataggaagagataagcaataggaagccattgtaggtgtttaatgaatcagaggaaagtgatttaaaagggctttaaggaaattatctggcaatagaggcacagtggcctggagtagttgtttccaaatttagtctataggcatatcaccaagggaactatcttgttaaaattcagattctcattcaggaggtctgctgcattactaaacagcccccaggtgaggccaatgctcctggtcctccagccatacttcgaaaagttaggccctgggaggacagctggggttgaatggaattctgatactcagaggctattgatacagccaattactctgctggaatcaagtcaccactttttcccagagccaaattccagcttcaatctagactgttacctggtcataagagaaagagccttttgcctgaaatcagtagccccaggtctgtgctgtggaaaagtcagctagtttgaggaaattactttcctcctgagcctctgtggccacataggtaaaatgagagacctgggttatatcgtctctaaactacattccatgatcctaaatcctctaactccaacacatagaatggggtcagaccaagttacatggccttttctaactctgcaggttattaggtattgtattctaaagagtcagcatgagtattttacatcctttggtatgtttgttgtaaaacatatgtgtccttcctatgtatcagttgtgtacattactatttagacatgtaataacaccctaaaaaagcgaaatacatttgtatgtggggagttgataaaagaaaatactattgtatacagaccgaaaaacattatcctttatttttaaaatattgtaagcactggcataaacaaggcatagcttacagatgtgtgtaaatctgcacaaattgtgcacatttactatttggagggggaaatgtattttaaaaattgtttggactatatgtcctttttctttttagcagagtggggagtcaaaagaattgaattacagggtagaatataaaatatctcctttaaggaaataaatgtgtaataggaactatctatccaattctctcaggcatgggaagcccttggggctcatgtaaattgtatataagtatgtcttcagtgtcactccagatgtttttgcagggaaataatccctctccccatatattggcatcaacaccctgcatgtaacctccatactcaaacttgccccaagccaagcagcatcctgaagagtgattccaggtgagattggggagctctaggcccttcctgccaccctccttccatacctatgttactaaatatacttctagacttggaagagagaatagagcctgtaagtattaacacaggacaaggctcagaagcaaagttaacccaccaggcagagaggtcaggccaggacaattttaaatggtaattaagtctctccacacttatctttagagattgtccttgggctctggctgagcagggccttccctgctgtgtgtggggtctgcttgcagttttgactctgcccctctggggaacccaagctgcacatttttttctgcagcctctgactatgaggttatattaataaaaaggccattcctgcctttagcagttgccgaccaagtctgctttatatggcaacagagccaggaagaatccagggcttcagtacagggacttttccactagtatgtactgttttgtttcatttcctattccatcttccaaggaaaaaatgaagtcctgctgcagaagacccagtcactaggcccacctgacacctagtacatatctgacaaaaggaatgctgccatgtggtacaagtggccttccccaacaatccccagccaggttcctgaaacctctcttttccaagtccgacccaccttctttgttcacacctccccactctaagaagaaagctgcatatcggaagccacaactaagagtgaacaaaaaggggcaagtagtggcaatatgctcaggggttccaaagtagaatcctgccaatgcatatagtgcttaaaaccataaaagcagcaaaggtgtcagtgaaaacgatgtagaaccaatgacagtgattatggtgccaacacatataagatgacatatgtaggccgggcacggtgactcatacctgtaatcccagcactttgggaagccaaggtggatggaccacctgaggtcaggagttcgagaccagcctggccaacatggtgaaaccccgtctctactaaaaatacaaaaatcagccaggtgtggtggcatgctcctgtaatcccagctactcgggaggctgaggcaggagaataagcttgaacccaggaggtggaagttgcaatgagctgagattgtgccactgcactccagcctgggcaacagagcgagacgccgtctcaaaaataaaataaaataaaataaaataaaataacatgacatatataaagagcaaagcacaagcctagacatcctatggctaaaactgttggttgtctccctatatccattctccttttctttagtaatagaagtctgaatttaaactgggcacatggctacccagagtaaagactacatttcctagcctccgttgcagctagatatgcctggtgactaggttctgctttctgtggagtctccttagaggtgggggtggggggcttgccctccttcatgccttccttcttgctgtgggtcagaatgcagctatcttggaccataaagtaagagtcatggcttgaagttggtgaaaacacatgatagaatgagcccaagtacctgataatgaagaagctatccaccatattgatgctggcttgtctatatttatgtgggagaagtcaacttctctgttgtttaaacccatgttaatttggattttctgatacacacagctcaattgtattttaatacaatctccttcctcaaggcctcatacatcaatagtatccccaaattaattgcatcattatttcattagagaatagcatccaaaataataacttagaagcttaaaacaacctattcattatagattcactccatgtattctctaattgcaattaaaacaagattataatataatgcatggtactgtattcctacttttcagtaaaaaatgaaaatgtagacattttctcttggtaaaagtcttactgtcaaagcagatgagtaactttttctctaacatttgttccaacagcttaaattgtatactcttgataaccagataataggtattgagtcaaatttcttccccttggttttctctccaacttcttacatggataggaggaataattttgtaaggtcagttcatgttaatgggtaagaaaaagtcataactactaagagcattaatatggatccatgttatttatttatttatttttgtttttatttatttatttttttttgaggtggagtctcactctgtcgcccaggctggagtgcagtggcccaatattggctcactgcaagctccacctcccgggttcatgccattctcccacttcagcctcccaagtagtgggactacaggtgcccgccaccacaccagctaattttgtttttgcattttcagtagagacagggtttcactgtgttagccaggatggtctcgatctcctaagcttgtgatccacctacctcagcctcccaaagtgctgggattacaggcgtgagccaccatgcctggcctgcatccatgttatttaaccctcagaatatccttaatttgcagattcagacacagagggttcaacaagcaacatgacttgcccaacataatagagctattaactagggatcttggatccagggtttctgatgcatacgatatcataattgcctatttacttgtacatcttcccagtagaccatagctccaaattcattattgcgttcccagtacctaccacaaggcctaccataccaaacatcctcaataaatgtacattaaatgaattaccaactctaaaataccactctgctattgctcccttgctctgcaagtgttctacaaaccaatgcccttaatatattccaggtcactcccaggccatatggcttgtcaagagaatgtggtcaatgatgagacagagggggagcaggactagtgaacacacccatatgacacacttgttctccacactctcctgggcctgggcgggcccaccacgtagggcatttggatgtgtgcctcatggcctgggagacaacttgcacttagtgtacttttccaggaaaagaaaaagacaaccatggtctaacacgttagaaacactgctgcctggtgttctgacatcatagcatccacccagtttgattcctggaggcaagcccacttgcaaagcatgggccagggatggtatgggggaaaggacaagggaagaggggtttggtgactgaaaagtgaagtatgtggctaagacaagcagtatgagcagacactgtaaagagtggaggggggcttctcatactggtatgtctccagatccattgaagttttctgtgttttgggctcagaggcaaagataacagagctcatcacttcttataagaccagtattctttgaaactttgatctgagctggtcctgctccaaattctcccaaaaaactatgaggatggggccaatctagccgtctgcctcttcccttactcctcctccagcaagggtgccagaagaagaatgatttgttttttctctgtggctccttacagtcaggaagtgagaatcagcttgagtgagctatggtcaccaatcacaatgaagctacagtggaattatcacctggcatgaagtgaaataacatcattataaaatgttgtcttccagttggaaagccagaagttaagcctgtgctggcattcactttctaataaatgggctggcttaaacattgattttctctccttgacttataaaaatgactaaaaatgtaagacagaattcaataaatgttttaaagattgccattaaatacaaatactttaacaatttaacaaaaccaaggggatccaaccttaaaattccaccttccttgtcctcacttctacccccaagtcaggatgaaagttcaaggtttcaaacaatagcacaattgcctcttacctggtacatagtagacactcaagaaaactgttgaaaaggaattgtatgtgccttattagtcggtacttcacaggatttttagagttggcttgacttggattagattcaagaatagtgtattagccctccaggggaatattcacaggcaaacagctacaaggatatactacattttcctttgttaaaacttgtatctgcattcaaatattggccttggcatttcctaagggctggctgctttgaatgttactatatcaaaccatctgcactgggaagcaaaattctgttaagaaatagaatcactggtagtaaagagattaccacattcctgaccactgtaacatcttatattttgagaatccccataagaaaaggtcatttgaaaatagcaaccctttgtcaaagtggagatgatgaatacttttgtacaatttatgactatggtcagtatgaaaattcatttttgtttatatgcgttttcagtggcttccctgcactgactcactaaaattaaagcttaaaaaaaaaaactaaaaaaacttgaaaatagatgatgacaagaggcttccagttagacgggattttggggaggcaaagtgccttctattgttcactgcccaaaactagaaaatcctggagggaagcaaatggtccagtggaggcagctctttggccgaggagagaagttcaagtgaaggtcctagagagaaagtgcaaagtgaacaatcataagggaagttgacttggcataagaagactagaaagtgccagtgtcattcagatttttagttgggggagaagggagactattttatactccctcaagaaaagcaaagggacttgattccatcttaaggtgacaaatcaggacgccaatgctggatgcacttgaaggtggagagctaggcagattgaggcagcaggaagcagggtgggagccagtgtgcaccaagtgggtgaggggaacatgtgagtcagttccagctgtcctcagaccctcctgcccagcctcagggtaatccaggggcacagagactctgagccctggcccacccgtggtccctcggattttgacactccctcacccccagtgtcatgcactctgacctactgcagggagggttggcaaggtgtgggcaatgtgtgtcaagatgtgtgtggaaggtgtgcagtagacacacagaatccctaaaatgtgatgaaaataaaagaatgacatcggcacggacaaggaaggcaggcaagtgttacaaatagttagaaactgtaaaatgaggtgcgacatttccggaaatcagtcagatctagtattagataatactaattaacaacaactggccgtgaaagaaggcacccgcactttttctccattgctctccccaccatcttatgccgactccttgcggggaggggtacagccttgttcccctaggtatcctaagctcgtttccaagtacttgaaggtgcctttggaaagtctgatgaatgagaaataagtgagcgagtgaatgaatgaataagctgcctaaagcagatgcgtttatgcgtgcattctctcgagtgaaggaagaaggaagaggtagggacggaggaggagagagagcacgcgcgggaaagataaatcgcgcccgcccgcgatggaccccaatgtcaatctgatctaggttagtggttctcaaactttaccatgcatcagaatcacctggagggcttgctcaaacacagattgccaggccccactcccagtttctgacttagtaggtgaggccagagagtttgcatttctaacaagttccagatgatgcgaatgctgttggaccacactttaagaaccgctgctctagagggtaactcggacctatcccagcgtcccagggaaacgaaatctgcagtgagaaatggaacgtccaaggcaatcttcagccggccttttaaaaacaagtctggagacgggagggtagcgctgctcagctccagccaactcactgccgcgtaggaacggaggtcatcggaaatcaagatttccgtttgaattttcccaaagtttaagcgttggcaagtgcgttgaaaaacacacacaatatgaaagcctaataaaaatataggtttgcagaccgtgccctagtcttttccgaggatgttcttttctgtcatccatcgtctacccacgttgagcacgacagccgggccagtcccgccctgggcggttggggccttcccagaggggcccggtgcggagagcccccctctccccggatgtgtctggggcctgtccttcactgcgatgtcatcggtaaacctggtcttccttgtcacggacactgaagcgcttggttcgaaaagcaccatgaattcgaagcagccttggacgcgggatcatgggcgttagcctggctctctccgacgaggcaaactgcaggagatccccttccctggagtcaccggaaggcgaaagcacgctctgtgcccgcgcgccgccccgggagcccgctcctaccccctcggcgtgcggcgcgggcctggagaccgcggagcccgagccgtatccagcttgtgcaggagccggtgcgcccttccgcccgctcctcccccgggaccatcctcacgctccagggtcgcggaggcatcttgcgactagcgaggggctgacggtggcctgggtggccttgcgccggctctgggctccgccgctgcggcagccgagggcctcagctgggaaatccaaacccgggctggacctgggctcaaggaggtttctgtccccaggctagaccaccacggccacggccacgcaacttgccctgagaccccgtgctcggccttcccactgagctccccttccctgtgactcagtgcctcgcaggctggtggccggaagggtgcctgcggctggctggcccggcccgattccgggtggcggggttcctgcagtgaggaacgaccctcagctcccgcagacgcgggaaggcccccgcgccatccgtgggagtggggcagcctgtctgcacgcggtcccctgggaaacccctctgcatctcccgcccggacaaggtccccggccttggaatctgcgccgccccgcacgcgaccgcctgcgaactccctgcgctggggtcagaactggtatctttctcctcctctggggaagtcagggcagcccggagtggcgtcgtgggtccgaaaaatccgtctcagaaacccaccaggagaaaaggctctggggtgggggacaccatgtggggctcccacaaaggacccgacggtgggtgtggagaagcttattggccctgagaataggcccaggccctctccacaggacccctaccgcacacgcgactctttctctgcagcaaaggggctcgggcccaggtacagggagccgctgggccggcggggcagctgttggccaagccctcacgcagcggagcccaccaccggtgtggccgccccctcagcccgcgccacgcagagctcggccggtgcctccagggggcgctgcggcccttcccgccggctgcggactgcagcccgcggctgcgctttcccacctcagccctgctgagagcacgggcgctgacgcgctgttttaaaagataaaattcttagccttttgcccttgtctccgcaccctcgactcggcctagtacacgcaatcctcctctgggttccccaggcgtccttgctactccagggccagggtgcacgcaccctgagcagagccaagctccctactcctccaggctctggcgaaaaacggccaacagtgcgggaagttcaaatgcaaaaggtccccgccccgcagaggcagtggaaggctgaggagaagggaggcgagtccccggaggtagtggctgggatccctggaaaaagataaggttttcacattgtattctttaaagattaaaagtttcgaggatccgagtccgagtgggagaggcgcgcggtccgagtgggagaggctgagagtcaactccagggaagtctgtgtctgacacctgctcgctgcttagctggcagagcctcctgggtgggccggggggcaggggcctgcgctgcgcgccccctcctcctccacctcctcctccgcgtttcctgtccctggccttcatcccggcctcccggggcgtaaacttgcagcggttggggttcaggcagccgctgctcgcgcgcccctcgtcagttagccatttccctgagagcgtccttggtgtcgcaagtccagagccgcgaggacagcagatgaccgggtcagcggaaatttcagagccagccagcagctcaggtccccggggccgcggcaggaatggaacggctccgcggagacagcctcgggggcacagccgggccactgcagactccgggacttccctctccgcacacccgaaacccacaactcgcccgtgggccgcgtggcctttctgcgccgagggctgctgggggcgggcggcgagcctggcgggtgacctgctcttgggtgggccccgcaatgcctgcgccctagacgccggccgggacgaggggctggctgggtctgagcctggagaaacacaagggtcagcccccagtgggcgcagaggtggcccaggagggcccgcggacggtgctgcgctgcgctcagcctccgggccgctccccgcgttcggcgcgcacctgcccatcgaggcggcagggccagcaggcggcctaggcgcggccgggccacgcggcatcccccaaagctggagctcgccgactcttccctaccttttcaagagaccgtagtcgtgcccagaacgccggcgtggcccagactccattttggaacttcgcaggctggcgtggacgaagtaaacacatttatggaaaaaccccggggttaggaggtttgcggaaagagggagcagctcgtggggttggaaattctgcctacccctcgggaaaaccaaacggttctgcacccaacgtacacatacttaagggcgggaaaggtgtgaagcccgctgctggggagttgcctcccctttgatgaaaaggaagtgcgaagcgtaggaacgctcttcaggtcaccaccccgtgagtgggaggcttggggagtctgaaggaagagaaagctccctccaaatctcccaaactgagaaaagctgcaggaggaatgaggcagttggagagagaggaccgcaggcatcccgcagctgaggctcaggactgagctctaaaatgaaagcacccctatgggacccaccaggcaaaacgttaaaaaaaaaaaaaatctgaatgcttaggcattctgctgcttccattctgtgtgtcaaatctactttgaagcagttaagtactgcaggatattaaacactcgaatctccgtttcaagctcactttttaatctttgcgaacttaaaattggaaagacagaaaaaaaatctgcgacccctgttatgttttaccaaaggaacgaaaaattctctccacctcggcataaataaaatagaaagaattttatcttaataaaataatatctgggagcttctgcttgactccccaattactgcttaaccttttgacagtttttagcctctgcttgtatttatctacttccccgcacgattgagattttttgaattgtcctttggggcgtctcattcaaaaccatctttcgacggaacacttttgaattgtacagcctcttggttgaagatctacgtcctcaaagtgcgggcttgccgtggagtaacacagatcccctctggcaactcgtctgggacgaagggcgtttttgcttagtgttgatcacgcaaatcacatctgaaaagaagctgcttaaaatgggtgtgtatcattcccttcctgtcactcggtcacccctattccagagaggttgaagtgctttttgcagttacactcacacaagaccaaacctttagaaggacctgaaaaatgtatcactgcactttgaattctattaactttcctggagactgaacattgaactcaatttttgctgggaatgaagatgtaaatgttttgaaaaactagaatcgcattttcctaaattttaaaaatgattgttcttcaccaattccagatggattctttattctttgccaatgggttgcagatgcccactgttttaaccaagttggtttactgcgtatgaaatgaacatttgccgattaaagcttaaatattggaagaaatttctcctggggcattccacgcgtctttgcaataattactaaattagtcaattgccacctctgtaaacaaacttcgtttagaaaacagcaggcgaaagcagactacacatgtagtcataattgaccaaaagtatgtacaaaactgtttaaaattggggaaagagtgatttatgctggagaatgcagtctagacctgaattattttactttacggtgaaggtagttgtattgaatgtgttaagatgtgcaaattaagccggcgagcgaaccaaataaaaatactaaatgccctttgggattctctgtggagtctttgagaggcagagaagcagttgttgagtttctaatggtataaggaaaagtggcaacgagaagaaagggggtgggtattgtgtttgtgtgtgagttttgaactgagtcacctacggctgcgtctctataacagggaaacctcgagcaaacctgtgcctttaagactcagttgctatccaaacagaagtaaacagagtggaccattagcagacgccgggcgcggaggcggagccagggcgctgagggccccgcgcggcggcgggacgcccgcccgaaggggaggcggggccgctactaaagcccaagactcccggcctggggcagcctggggagggacgcgggcggggacggagctcggcgtgcttgctgctggagggtgatggccctgcaaggctgtgggctccgacctcaccgggagtcgacagcgagaggttcgccgaagagcgaggttctgggcgagcgctgaacgccggccccaagcaccccgggtctttacacagtccgcgtccacagactctgacgaagacgtggatctgctctcgctttagctgctcgcggtcctccagatcatgtccgcgactcctgcgactccgcgcggaaaaaaaagtttgccaggcgtggactcaatgacctttccaagctgtgcgcctcgctgcctggaccgggtctgagcgcggctgcccaggttgacctttctgcgggaggtgagtgttcgctctgggaaggggctgtagctgccctttggaaggaagggtttgggggtgtaagaggcgttcagattctcggtctggtgtgccccaaattcagatgtgaaaatagatcatggggatgcaatcccagggcactgtatttctcacttccttgggtccctggcacgcgactcccagctaacacccaaccacacacatttctacatactgtttcttaattttgttttgggatatttaatctaagcggtcagcaagacttcttataaaagctggtctacgtacactgagatcaaaccccacaatcccatggtgtttctgctcctgccctagcaagcctgggtcgacttgtcccggggcagccgcggcagcgcagcgtggacgggcccggacacccggtgcctgcccagccagcgacgctgaaggcacatttcaagagggaaatagttcagtcctcggtaatttgtcaacctcgtgctggctttaaaattctcctcccaccttctagtcctgactgagggggcccaaaagcaaactccccgggggcttaaacgctcggattcctgagaaacggcaagtgagaaaggagttgcagttgtacgaagaaggagcgaggaaaaggtgtttgtggagggagccccggatctgtcttcctacctgttagccgagaacaaaagggggctggcgtttcccgaagcgaaagggcgcagacagccactttctctgctaaacaaactgcagtcctgggcagaacaagaaaattactcacgcagggggagcaaggggagcacagagaaacagaacctagattatgcggaaggcatcttaatttaattaactccttgggaaggcagaggcgctctgaaggggcaggaacttcgcagccgtttctctattcacctgatacagtctggccctaacaatctgtcctttaacaattttttttctttttaatgatcttctttgatctacttagtctatagctctctaatttatataaaattctgctgtggtttgggctgaaattcagtgagcctacctatccgaccatcagtcatttatctcatataccagtgcacaggttttagcagatgaaccctgactgtatattatttttagataattcagtgtaatattaccattaccaaagagcgaaactccttatcaagttacttcttaatttttttctccaatgttttgaaagcttcactgaactgaaataagtgtgtacacatcttccttggtgacagccagtcaagtaaattttacaaaatttctccacatgcctggaaattcctgtgaagaagactgatgaaagaaaagtagcctcagctccaccaacatatttatgacttttcattggtttaagtttctttccttgcaagattaaaagtaaccagtggtctgaaacgggacggtggagaaatgacagcagatgatgatcgctgttatttcctgaaagggagtgtgggaactacaaggctcagctctagacaaaacgaaagtactttaggatctctgcattcacttaaaatacttcttttgacatacatttccagcaactcaatgggagtgtggaaatttaaccttcctaattatttgtggcaagagccattggtggatatttaaggttgttctgtttgtaaaagggtttcaaaaggaccaatggtttgctcttcctctatgaagaaactatctgccctacaaattaaaacaaacaggtactatgaaatagcactttttttttttactaacatgaacctgaattatattagtcgttaatttctgtattataaaccattcagagaaaagggaaagaagatggcactcaactttgtggcagtgtaacctttatggcagagttcgctgtgcctttggtatagaaatcacaggtcacaacagtactttagccaacaccactcccccacatgcccgctcccccctccccaacgcatacaccctgtggtgggagttgtgctttgcctcctgtatttatttctaagaaatctagtctgggaatacacccaaataataatttcggtttcctctctatgggaaagaggttgcttttcaacacgaagggaaaaataatattttgaatctctggaaaatcctcattacgcaaagagaaggaaataaaggtataaattattatttttaattgaaagggaaataatcaggtagattaccaggaatgttagtagaatccttttcccctgcctccctaagagacttgccaccgagcaaaaatgaatcgtgatttgtggtgggaaagttgattactaatgggggtttgcagttgcggttgaatggtctgactgagaccctctgactgttacccacctctcattaactcttagcctgaactcccagaccgcataccaccaagcagaagcgattcgttaataaatctctgtcccgagcccttccagaggaaggtgtgggccccgcagaggcagccagatcctgccttgccagagcgctctgtcattagcgtagccccctaagtctgctcacagatggaaccataggcaatacttcataacgcgctggagaggacaagtcagacgcaggaaggggttgggtgggaagggaaggctggagtctctcctgccttcctgctgggttcaaatgccaggcttggcggttggtggcacagactgggaaacgtgactcctacacctgggggtctgccctcagagggaaggccctggtcccccgaactggcagaactcctttctaaaaaggggctggtagtgggagaaggtgggcccgctgtgaatgtaggtgaggtgatcccgggaacctgggtctgaaatcagacctgtgttgccattgggagcacggagagaggggaagcgccctgcttaggcccaggccgggcgtcctggtggtgggaccgcagccgcactcacctccaggccaacggacaaggttcctgcaagccagcagggccactctgtgcttggcctactgcagctcccctgcagctcctttcctctccctccccggagcgctctcctctctcctctcccctctcttctctctcctctctcgtctcctggggcatcccgggtggagggatgtaggggtcgctcctcggtgccaggccgggaagcagctcaggcctcccaagagcttggcgctcagtctgggaaaaggggttcctctggcctcagggacgttctccgcccccaccccaccccctgggagcctgaaccatctggaagggatcttagtcgggggttgggaggagagcccgtggataggaggagggggcgattctaggccgaatccagcccctgaggtgtcacttttctttcctgcggcccgtcaccgctgatagatggggctgagggcagaggaaggaaaaagaaaacctccgaggtcagtgcggggcgaggtgagcccctcccagggccctctggcccaggaggatgaagcgcgccggcttcgctcttgcacgccggcttgccatccgggtaagcgcgggaaaggcggccacagggcgcggcggcagcgcagcgcgtgggatctcacgacccatccgttaacccaccgttcccaggagctccgaggcgcagcggcgacagaggttcgccccggcctgctagcattggcattgcggttgactgagcttcgcctaacaggcttggggagggtgggctgggctgggctgggctgggctgggtgctgcccggctgtccgcctttcgttttcctgggaccgaggagtcttccgctccgtatctgcctagagtctgaatccgactttctttcctttgggcacgcgctcgccagtggagcacttcttgttctggccccgggctgatctgcacgcggacttgagcaggtgccaaggtgccacgcagtcccctcacggctttcggggggtcttggagtcgggtggggagggagacttaggtgtggtaacctgcgcaggtgccaaagggcagaaggagcagccttggattatagtcacggtctctccctctcttccctgccatttttagggctttctctacgtgctgttgtctcactgggtttttgtcggagccccacgccctccggcctctgattcctggaagaaagggttggtcccctcagcacccccagcatcccggaaaatggggagcaaggctctgccagcgcccatcccgctccacccgtcgctgcagctcaccaattactccttcctgcaggccgtgaacaccttcccggccacggtggaccacctgcagggcctgtacggtctcagcgcggtacagaccatgcacatgaaccactggacgctggggtatcccaatgtgcacgagatcacccgctccaccatcacggagatggcggcggcgcagggcctcgtggacgcgcgcttccccttcccggccctgccttttaccacccacctattccaccccaagcagggggccattgcccacgtcctcccagccctgcacaaggaccggccccgttttgactttgccaatttggcggtggctgccacgcaagaggatccgcctaagatgggagacctgagcaagctgagcccaggactgggtagccccatctcgggcctcagtaaattgactccggacagaaagccctctcgaggaaggttgccctccaaaacgaaaaaagagtttatctgcaagttttgcggcagacactttaccaaatcctacaatttgctcatccatgagaggacccacacggacgagaggccgtacacgtgtgacatctgccacaaggccttccggaggcaagatcacctgcgggatcacaggtgaggcgggcaaggaggatggctgggagagggaaagcgaatttgtcctggacacaccgagtcctgatagacattcccagtgtcattataatcccctgtgatctaaaatacaccctcagtcacgctcctcagcccggttcagctaattcccaacatctaccctttctttcccccagcggctcttgctacgttcttgtttggaatgagggagggcctttcctcagtcttggacaggaacaatctgttggccttagtcctgggatggttatcctgtctcctcccggtgctgtggggagtggtgcaggcagaacccaggtaccctggggtgccggtcctggctgcagtcgggctacttctgttgggtttcgtccctccccccaccccccaccctccacccaggtgcgccccagagcctgccgtggggacctttcttttaagctgtatttgtgggttgagagggggaggaggtcttgaggtcaccgaatttacaaacagctcccacctcccttccgcgaccttaaactctgcattaatacaaggcaattgaaggcattcaataatgtaagtgttatcattgggtaaaaacttctcaggagttggggagacctttttagcggtatcttttctggactctacctgctgttccccagagatgagacttctgtacccatcctgcgaggctgttaagggattcactaaaattagcacttctaaactcagccttgccttacatcctgatttggccaatttaaatcccagagaaaaccatggaggccaagaaaggcccgttcagcggggtttcgagctccagaatacgccagagagggcgatcaagtgtagataaagcccgcgggctggtgaatattttgaagagaattagttgagattaaccataaagagaattacacaggaaaaaaaaaaatctaaaaacgtaaatggaaatcttgtttcttttgttcttccacgacttccttttaagtaattgctaaaagtaactcttcaccatggggcaaagttatttcaatgaaaccttatattgattttcagatacatccattccaaagaaaaacccttcaaatgtcaggagtgtgggaaaggattttgtcagtctagaactctagcagttcacaaaactttacacatgcaggtaagtttgttttcttgtttaaaaacagtggctggttcgtgttatcattactgctttgcaaaaggtgttcaatggcagactctttctcttaaaaggctctatttagattagttctctaggtggggaaaagcaacacttgatttctttaatacataaaattaatcttgtttaacataaagcatttttatatttttctcaaaaaacggccactttgattatcataaatcctaattttagaatttttttcatccaatctgtcctgcatttaaagctttcgtgtttaggaggaaataaaggtaattttgataatggaggcatagtgaaatcccatacgttctctttcccaagggcctcataatttgtagctttcaggacattgaggaatagtttagttttccagcaaagaggagccttattacccaggagaatgttgttccttaagagaggattagagtttttccttcccccttttcctgcctatgacatggtgatgaaatgtgaagagctggaaatcacaaagcccaccgaggtggctgcgggtctgcctccgaagttatcagtgtaatcgggcctctgtgtatgcctgcacgtgtattttcatgattggaagattaggagcacggatttgttcctgcaagtctcctcttttgttgtcatgagagtgttatgttaacgcttgtgataacgataagacagaaactattgaaaagggtgcagtggtggtgtgaaggattaatcctttgcttgcttcacatctgaacaggaatctccacacaaatgtcccacatgtggaagaacctttaatcagagaagtaatctgaaaactcaccttctcacccatacagacatcaagccctacagctgcgagcagtgcggcaaagtgttcaggcgaaactgtgatctgcggcggcacagcctgactcacaccccgcggcaggacttctagagaagcccaggatctgtcccgtgccgccgctgctcccctccccagacacctctccacgtctcctacccagggggtcgcatccctagcccttcactgaccccagctcttcccttgctgcagccgcacctgcagctccagggagttaactcttcttctgggggactgagaactgtagaaagccacacactactacatcccttcacaaagagtatatgctagtttcttgtagatattcacagctcattttagagctctgtacataatgttgtgggtctttgttttgttgttttgtttgctttgggatcttgttggatgcacttagatatggaaaatggaagccaaattttatctttaaagactgtattttcaaaataaaactttttcttgtttgtttcaaaactcctgcaaaggtgtcttgctatttaaatactgtttttcctctagattctggaagagtgggctgcctctataaaattcaatactgaaggacattctttatccctaggtttaaaaaataggatttctcagaattctcattctgcaacttcagcccttccctttttatatggtggcattttggaattagacaattgggctgcttgtttttcaaagatattaaaaacattgatgcccctaaggttttatccccttttgtttatttcaatgacttgcgtattattccttcagataaatgcaatatcttaatataacatgcaacttccatggctgtcctacttgaaagcacaggatgggaagaagcaggaagcatagaagaggtgggagcttcttgccacttcatttttgaaaagtccttggcctattgtcacaatttatgatgggcaacttctcttaccattagactttgaacactatgatttatcactgtagacagagactttatcctgccttcaggacagaagtctaaaatccgacagaagagtacaggaagatacaaccttcaagaagacgggagagaagaggagaaaggagaaaccactaagctatgttcacaaaatatttttttccaagggtggggatcctttcttctagaaggttaggatttctctgcaaagcaaactgagttgggttaccagtgaggtttccaccactggttggtctttgtccctgggaaaatgccagaagtgcaggttactccatgtatagagctcatggcaaacatgtaatcaccttctgagacatttcaacctttcctaaatggttcccggggaacatgactctagtatagtgacaaccctgaagtatagtgtaggatttgagtggagggctttggaaggagataaagagtagtactattcagagactggaaggaaagtgatttaacttaaagggggaatgacagagaaacctgtggcacagtaggctctcacaaactgtttaatatggaataacaggttaaacaaggcattatcagatttatgtaaaatttgtatatttgtgtggggatggcatgtttcactttcagggtgattccaagcaacatgtcctatgtttgtaccttagaatcttccagaaaagtagatagagacttgaggactaggttcaaaatttctcaacagtaccttgttcaattcaacttactaagaggtttcaaaaagtgttcctgactaattgcttcctctgttttcaggggagctggctagaagtcatgtttatctctcaccagagattaattctctccaacaaagtgtccactcaccagcctgtgtgcctaatgctcacacaaatgcattccccagcgtgggatgagcccaaagtcttcctgaggagtaggggtagggatggagtatggagtgcatgtgcttgtgttatttagaggaatgaaacagctgtttgctttcttttgtttgtacagaattaactcagtgacctccctgcccctcctctctcaagatcctgcccacgttggtacagaagatttgaatactttagggcagagttaacattgactgtccctagagccccactaatcctgcaggctttttctacatagtcaatctcacagccccacccacccctactgactacaagtgttacagttccatctcacagggttcagtccaattatcaaagaatgacccttgttcactatcaagctacaggcatatccttgaagtccctattacaggaatacatagataggtataaccacagaactgttcctccccatttattttagtggaagaaatgggaatcagaagggaaagagaaagaagagaggagaaagtggagaaagcagttccccatctgatacacatactattttaaaagttaaggttacttataattaatttatttactcattaatttaataaatgcttattttatgcttctcatatgccaaaccatgtgctaagctccactgattttcatgatcagtttctgcctttctatatctagtgacacatttttggaatcttggctacttagataattaaaaacctatgatagggctaatttaacaactcccctcaatctagacacttaaatccagcattcatctaggctcagaaaggttctagcttctgtcagggtagactttttctacatactcttcatgatcttaggtgaacttttatttttatttttaagataaagtctcactcgttgcccaggctggagtgcagtggcacaatcttggctcactgcaacctccacccccaggttctaaatgattctcttgcctcagcctcccaagtagctgggattacaggcacctgccaccatgcctggctaatttttgtatttttcgtagagatgtggtttcaccatgctggccaggctggtcttgaatgcctgacctcaagtgacctgcctgctttggcctcccaaagtgctgagattacaggggtgagccaccatgcccagccaggtgaacttttaaacagtgagttcctctccaaattctgggttttgttttcttcttctttagactgtccaagtgtacaggaaatgaacaaatttatgagacatcatagggaaaatatcttgtattttaggaaattgatctgctgggtttttttggttcagagaagagtcattatttgagttttagattagcctgtgttttccttacaccctctaccacagtcaactcatgaatcaatgctcctggcaagagaccggccaggagttggaaatatcgcaagtcataaccacagtgctgaagaacttcatgcacaagttaggtatttactctcgagctgtgactgtaatctcattttgtagtctatgcagtaaggttttaaaaataatttctagaaacgaattacattgtaatcaactgttaatataaaattatgaatgtgtgttaggtgctcttactgatgctaaccttgaaatgtaggtcattgtggtactagtgctttataattgtagcaattacaattgctattttgcacaggcacacccttttttacatgaggaagcatttttaaaatctgtctgtagaacaacaaaatatttaaaaagtcaacaaatctaaaatctcaaattataaataggcccaactaccactagtgataaaaccagaggtggttactgggaatttcatctgttcatctgctgatgttagcccaggcatttggtcctcttcacttaaataatgttcagtcagatacttttacccaaactttgattctggaggggcagcctacccttggaaggcacttgggaaacattagttcttgaggatcgtcaacatgacaaaatagatgcatttgcactaaacactgtgtagaatcaacagcaaattttaatacaagaaaagtattggcggccgggcgcggtggctcacgcctgtaatcccagcactttgggaggccgagacgggcggatcacgaggtcaggagatcgagaccatcctggctaacacggtgaaaccccgtctctactaaaaatacaaaaattagccgggcatggtggcgtgtgcctgtagtcccagctacacgggaggctgaggcaggagaatggcgtgcacccgggaggcggagcttgcagtgagtcgagatcgcgccactgcactccagcctgggcgacagagcgaaactccgtctcaaaaaaaaaaaaaaaaaaaaaaaaaaaagaaaagtattggcataatgggttgtctttcttattaccaaagtgattttaatattattataataaggaaagatttaaacaattgatgaaaccatataacacattgcaaacaggaatgacttttgtattttaggggtttatttgtgtttgcctttattagtgtgttatatggatactatatttctcaattttttcttctataatgtaacttgtcactgataaccacctctgctgacagcaatgagcaataaagggtgtggagattcagaatgattcagctttgatgacctgagatatttcaagttcattcctgtttctttttttttttttattgcttgttggtttttttcacccaacacaagctaccttattatctatgctatgtaacttttttttcttgaaactatcccaggcaaaaactgatagtgaaaaattgtaagtaaccttatattatagcccacaagaggaaaattggtaagtaaattatcatgctatatccgttaggatgttttctactgcacagaacagaaaacccacctcaaaggggcttaaataataggagatattttctcacataacaagaagtctccaagtagggttcagggatgtgtaattaattggagtgtcacaatcaactaggatcaattcttcctacttttctgttcttccatctttagtgtgtatactggacttcctttatggccacaaaatggctgcaacagcaccaagcactagctccactgctccctccttacacacattccataggcagaaaaagggattatctcttccttgtatcacttttaaggaactaagaatctgtttcacaaatctaacctgtagatttgcccttatatcttattggtcagaagtatgtcacttgtcccttccttggccaatcactgataaggggaatagaattgtaccatgattggcttaaactaaattaaaaaatcaccttttatgagtggaaatggagttagcctttaagcctgaagcccttgaccacctgaagaaacctgagttctgttagcaggaaagaaaggagaactggctattgttaatactaggcagatgtttaaaatgaagtttccattaaataccttgtgttaggagatgttggtattagacagtattatctcaactatataaaaagacagagacactattatctcaaatatataaaacaaacaaaacctttaaaaaactaagcagaaacaaagactagcagaaaatataccaaaatgttaacagcagcttcatgagtgacaaactaagggtacacttttcttctcctttttaaatttttaaactcttccacaatgagcacatgttacttttatgagcattcagagctccttttcctatcttttctcttctctaggtttctttatcctggttccatattttcactctttttagagcttcgacaattctaacccagggttcctcatgtgtgaacattacaattacccaaggtacttatttctgtgtcttccctaatccagtgggtgaattggaatttctggtgataaagaataagtactctattttaaacaaacacttcaggtagttcttatgtgtattagagatagaacttctgcgttagcctttgataccatcattccctttatcttatccatcagccatttactatgtgcctaccataataaacataaaacaaatctcaacccccttttctttacttatttactcactgtccttgaagttgtcaaattttcctctgctttgacgcttactgcccttccgtggtctttcccatgtacttttattttctattgttgctgtcccaaatttcaattttttcattaatagacatgtttggctttgatattttattcattcattcttctttgttctcttgatctgctccctaatttaaagaagcagcagatgaaagagactataataattggctgaaatgggaaaatcacagagtaaaaataattttctttcaatttactaatgaaaatattgtcaccaaatgacttcttacttcagcttttgtacaaacagcattcatttgctgcagtaatgctttacgtattgaggtgtggatgtgtgctggttttaggatcagagctaaactacattgcttttagattatttatgttatcatcacactaaaattagagctggaggaggccattttttgacagaaagagtcataaacgtgaaggtcagagatggatttattttttttaagctctgaaactgtttatggacaagacagttaacttctctgagacccagtttctcatctgtacaatgagaatttgcactacacaatttataaggtcctctctagctcgtaagatataaggttttgagaaaagagcatttctagaaaagtattgatgatttcacaaaagttagaaaatatcaagaaatcagatcacttttgtcccataaaaatttttattaactcaataaaaatcaatgtgatttctacttgaaacacatatcatttattttcttaaaacttctcaaaattttaaagaccctacagaagactgttaatttaatttcttaaaactttcttaaaattttaaagaccacacagaagactgtaaattgaaagtaatatttttacattgaaaagtaaatttacttattttttagatgataaaaacaatcatacttattttaaaatattcaaacagtatataagtgtataaggtaaatttcttattatctgctcccaccccaactaatctggacaatcacacacaaataggatctactgtaatactatttttcaacttgcttccctccacccccacttaacaataaacaatgtatatataaaataatgtatgtataaaccaacgcatatattgggtctgttttaccctatcggtaaaaacagatctgctgctaatgtaatggaaataatcaaaacaaaactaaggacttttaaacctgaggattaattcttatgcattagaatttaatatggagaaatagggaaatcattctgttaccgaaattatttacaaaataccatccttaactgacaacctttagtcccgtatcttcataaaagcagcttagagtgcctgaagggttttgagggttctgcaaggtgtgtcatattatagctcacatcagtgcacattgatgtatctctctggcaagaactgaaagatacagttcttaaatcccctgctgacccattatccatggatcattgacaagatagaatgtaatagctcctgtctttttaccaaggtaaacctcccagtgaaactgcattgttcatgccctacatcttttatctaaataagaaaatgaatatagggaaaaaaactatgttaagtagataatataaatactttcatattctttattatattttaatatttgttgaatgaggaaacataaactgtttaattgcaggggctgagactaagaaagttttcccataacctatctttccaaatagatcatcttaaatacaaggctaaaggaattgcataagatccagcatttagaacaccaaattaaactaatagacatgttgcctatttaaggacagcattaaaacagtagttcagttggtgttatgggtcagaatttaacatttcccattatcttgatctaaaaagtcaatgtttctctactctaaaagttatttcatttgtgaactgggtcataaagagtcataagctctcagagggatttattcacagacctcggcaatgtttaccatgtggcactgtgtttttgcaacatcacatattgacagtgctgtgttgtaaatttcataatgcgatgacaggacatggccatatttttatgtggttctgatcaagatccatctgaaagctccttattttatgttagtcttcttgacttctaaaagaattctgccatatttctatctgtttaaatctagaaaaggttagaaatagaaagatgatgctcttgtcaacttgattaacacttcatttcctgcccggggcaaaataaaaaaagaaaatgaaaaaataaatacataacttgaccaaccatctcagtaagaatatgggcaagtgaatcagatatttggcctagaccagtgaaattaaagatacatatccctttaactcagtgattccactagagaaactcaaacacatctgcagaaagatacatgggcaggaatattctctgaaatattgtttgtaatagagaaaaactaaaaaaaaatcaatgtcccctagcatgagaatgggtaaataaataatcaatattcacataatagaacaccatatagtagttaaaatgacccgtttagcagtaaacgtatcagcatggattaatctcaagcacataatgttgtatgggaaaaaaataatttgcagaatgatgagtacctatcattcatataaattttggagacatgtagttcataaaactgtagtgaaagtataagatgttcttggaaataataagcaccagagtctgcatagtgggtacctttggagagaaagaggaaagaaattagagaccagtacatattgaggggggatttcagttgtatttatgatattttatttcttcattatatctgaagcaaatatagaaattaagacttggaaaagctgagggataaatagaggggtgtttgtcatattagtctctctactgtcctatatacttggaaattttcataataaaccgttttcaaaaaagaatcagatattagagctgaaagggactttaggaaatgtctaataattggatttttagtgagtagctactctgtgatgttaggattactctgatgatgttaggattactctggtgcatcagagacacaagggctctacacccttggagcttacattctaccagaaagagaccaaatttaaaattaaacagaatattaacatggaccatacagaggatttcatttcatttgaggatgaagaaattgaggtgcaaaaaagtcaagtgattttcccaaggtacaagccaattctagaactttgccttcctctctgtctttctacatacttctattttcctctggtctccctctaacctaatgttattctaattattgatggtgttaggcacaagcacattgccagtgtctcacttgtttgtagccatctgtttggcataggtacaaatttgtcaaatactaaaacttaactaaatagctttaaaattgttgaatattttgaacatgacattaaattacaaccttctcatattaggtaggtcagcattatctttgtttcatgggtgaagaaagagatgaatgggggagtagctgtggggtgaagtaaattgcctaaggctctgtaggaaacaagagtgacaggttctggatcagaattcagaactctgacttaatctaatgcaaaatctggagtacctttcttgctgatcttcccttttaggttaatgtgcctcacttccacacattcctgtaaagctaacactcttgaaaattgtaagaaaagggcccttaccactaataccttgtcagataaattgagtatttttcaccttcaaagttttgaattcattggtaaacatgtttaatgtaaacttttatgtccatctaagtgtgcaaactcttctctccagatggcctcaaagaacattcagggaaatcattttccaaaccataactgttctattcagagctttgaagacagatatcaggtgagcttttatcgactgttggaaaataaagggagtagaagaacaaaatgattatggtaacctaggctacctagatggtgttatgacattcattctactgacaaaactctagcattcataaagtttattttaaagtaattatcttcatttctatttaaataattattttaatattatgatagctgaaggtgattgtttcagcttcttcttcttccggagtttattaaaaaagaaatggtcgcttgtaggaatgaagctcttatggggaaaaattattctgagcagaatttaaatatccaacatcagaaggtactatgatgtaatactattgctacccaggagtccatcagcagactgtaccctgtgtgtcacatacttccctacaaagctgattacaggtttatgttgtaagtgcacaatattgactggtacaggatacagatacttattatccggaattacttattatcttcattttccaatgaattctttcttcccttggttgatgtgtgaagctaggtttctaaggacttcttcagtgttcttattaagaacatctgtaaagagcatcagaatgaagtgttgaatttcacccatttggatttcattaaagtgtctatagttgtcaagcatttagaaagtcaagacactaagagtttggggtttgacccaaaggaaattggtcctcattttaaggctaaaaaggagggataacagagccaaatttttttagggaatgggagattaaaaaagaaattattcctttcagatacatgcccctaaagaatgaaagcttaaacagtcatactttgtaatagtttcgtttttcatcttgccaaaacaaagtgtgggtttattgcagaagttcttaacctagagttcatggacctttagtggtccataggcagacttcagagagtccataaactttgtgaaattgtaagcaaaatttcacttgcgtatacagatgtgtgtttttttttcccctagggagaggaaactagctttcgtcagattttcagggacatctgtgattcaaaaaaggttaagaaatggtttattttcttacttatttaagaatcttaaaattttcaaagtatctgaataagcagagttttatatttctctttttattaaaaacacactatatataaatgtatatgacttttaaaatgcaagtaagatatactaatttttaaacattaacaaatgaccagaatttttggtaatctgtgaaatctcaattataactaatttacctaaatatacaatctgatctaaccaggtgtaataaaaataacctgactagctatttaaaagaaacaacataaaaagagtagtgaacagtgaagataccttgtgttggtggtacaaagccgtaaaaaaacaaagcagcttgaaaatttttttattacatgtaataatagaagttttctatttggttaattaattatactctaattatagtaaagtggcatgaattaatttatattatgactccaatccactgagtaaaaacagcagtttcattttataaacaacaataagtgaaataaattctgccgtgaaaaagccactggatatttttaagttttgtaacattttaaatgaataccaaataatctgatcatcattacactaactctagttccatttagacttgggacatttggtaaaatttaagatgtcatattttaaattaaaatataacgtgttatttcttctctgcatacaattttttaaaagtgttgttttaactggatcttcctataattacatttggttttaaaagtagattatttagtacacattgaactaacattttttcaatgtggttaactaacattttttcaatgtggttttccttgtgaatcacacacttagcctggaatcaaaagacagaatgcagaaatacaacatgaatctttgactaataggctatctgccacttgtttttgttttgtatcacaggagtatatacaggttatttctttccctttagctaaacttcaggcatgtctactttatctttgctccttttccagcaaactttccttagccaccttcttgaattacctatcctctcagacagttctttagcttattatatgtgaacctggcttgtttccaaattaacttggctggtctcttaatttttcccatcctctctcaaaagccctgatgtacccttctgatatttaccaaaccaaactcagtatccaggctccacactctccaccttcttcatatacatactgcatgtcatcaacttttcctatactatttttcagatgcctttattttctcctcaaactttgtctttctctttttgcctcaaagtattttcatctgttcttaaaaacatacttaactgtaaatattagtggaaaatggactgtttgagttgtcaatttttgttttacagttaaggcctctttttgttctttagcatcaagtttatctcttacgatttaaataaggttagagccgggtgcggtggctcatgcctgtaatcccaacactttgggaggccaatgcaggcggatcatttgaggtcaggaatttgaaaccagcctggccaccatggtgaaccccgtgtctactaaaaaaatacaaaaattagtcggtgtggtggtgggtgcctgtaatcccagctactcaggaggctgaggcaggagaattgcataaacctgggagatggaggttgcagtgagccaaaatggcaccactgcactccagccttggcactccatctcaaataaacaacaacaacaaaaaaggttagaaactagtaaaggttatggtatatgcattatatcttaataaagctagtaagctattacaaaagaacagaaagcaatgaaagagaaaaagagaataaactacaggaatttacataagtgttggacagataaactgcaacatgaaatctagatagttataattattatagatactattacatgcactgcttaactttataaattctctgaagtcctcctataaactaataatttaatctcctctgctaacttactgatccagacacaaattatgtaaaagctatctatccaaatacaaattatgtaaaagcttctagcacaatggtggcatataatagaataggtgtcaaataaatgttaaaaaacaaaaaaagttaaggtacaattgatagagtcaagttatatatattagtatagggtttaaaggctaaaagaatttagcctatgcctaaaatagtcaggagccaatttaaagtttttaaaaaactctttttctttgatattataaataatatatgttgttacacgagtaacacgattggaaaaacatcagattaaaaattcatttttaggcccttcttagagtacaattattaaagaacagttgaaaattggttttgtggccaggcacggtggctcacgcctgtaatcccatcactttgggaggccgcggcgggtggatcacgaggtcaggagattgagaccatcctggctaacacggtgaaacgctgtctctactaaaaacacaaaaaattagctgggtgtggtggtgcgtgcctgtagtcccagctactcgggaggctgaggcaggagactgttgtgaacccaggaggcggagcttgcagtgagccaagatcgcgtcattgcactccagcctgggcaacagagcgaaactctgtctcaaaaaaaaaaaaaagaaaaagaaaaaaaaaaagaaagaaagaaaaaaaaagaaaattggttttgtggagtaaaatgatgattcccgtcagctttctacttattataggactctcacaatttgggtgaccaaggaatattcattccaatataattcttccttttgtaaacagagaacaacttttacattttctgctaaaaatataaaatggtgaatatttagttcaagatgtttacattgctcaaaaggtgttttgttttgttttttctacctttcatctcctccttcctctcaggtcttcagaaccaatgaagaagaaaccattacttatcaaagaaggtgaggtacaaagctgatgggtcacaggattgctagtcagaacagctagcacatttttaaatttgtaatctttattatgtttcaagaatagcaatgtctttgaatggaaggaacttcagaaatgtctttgttcggccgggcgcggtggctcacgcctgtaatccctgcactttgggaggcagaggcgggcggatcacgaggtcaggagattgagaccatcctggctaacacagtgaaaccccatctctactaaaaatacaaaaaattagccgggcgtggtggcggacgcctgtagtcccagctactcgggaggctgaggcaggagaatggcctgaacccaggaggcgagcttgcagtgagccgagattgtgccactgtactccagcctgggcgacacagcgagactccgtctcaaaaaaaaaaaaaaaagagtctttgttcatcccttatacagtattattaaaggtaggggcacttacattttgtgaagtcgtaggtaccattattaggtaactctgaacgctggagaagtcttatgttcaatcaaaaatccacctcattgcaccttccaatgattggtcccagtcctgccctgtactttctctaagctctaaacttgggagaaggggagaattcctcttttataaagagatgaaaagatgtttgagctggactttgtaaaatgtttagaatttttagggagtggtgtcaccacaccaccagatcctcggaaaaatacattgcatattccttctttatgcagattctagagtaggaagttttcgtctctctcatccaaatatgccaaggaatttagcaaattttcagtctttcagggacatctgccaacaattaccaataaatcaacgttagcataccttatgggaggagagagaaggaactagaagtttcatggttttatttccttctctgatggtgtggtaggaaggaagattaactggtttgatctgaagccttactgggtataaatctcttagatacctggcccagattaactgaattatcccagtattgagcatacaggttgtcaagggtacttgtatcacattgatttgcctaataaccctaatctgactgcaacctcctccaactgtaattaggaggttccattgtccttctcttgcaagttctaacatgttatgttcccatcttcattcgaaacggcctgagttgcatgataatatctcaagctgccaaaggccacagcttctttattaaaaaaaaaaaaaagaattattacagatcatgccgcaggactcttagtgactgtctctggcttggcacatcctcatctatttattcatccaaataataacttcaaaaaaagttaaaaaaaagagtcaccctggtagcaagactgagataatgtatatcagctttgatcacatgctctgaggtttgggaaaatgaattattataaactgggtgtcatcctcggctcttccctggaaacacttttcttcaatgttgcttttgatcatattttaaagttgtaattaaggattcctttcctctagtcatgttttctctcttgagttaaaaccttatggaaacaatccagtggaattatatagctatggtttgactcacaggagctcttggtaatgattaagtttgcctggacagaaggatatggaataggtgtttgcctagtgggtgtgtcaacagagagggtgtcctttttttttttttttttttttatctttctacaacctggtgtcctatgaagaaccctaggacatatctgtaactaggaaattctttgattaaatgtatatatatatatatatatatttttccaatacttatcattcatttgatagacattcaacaaatatttgagtatctcagtgtgttaggcgttgtattgatttattataagaggcaaataaagaaaaacatcaataaggaaataaatatgctatgatctgggtatgtgtaggcttctatggacgtatgtagaaggttcccctgtcagtgagggtggaagagaggggataaggaagactcactggagaaggtaaatgtggtttcaatggtgagagaacattcaggtgagtttctccgaatgaagtatgctctcctggtaatgatcatagtaatggcaaatagcagggtttttttaaagcataatccatgacacaaaattctttttagacgctctgagaaaaaggaattttgtagtcaaatacatctgaaacttaacaatgtatgctaacaactaatgtctctgaacagtctggcagtaaagaaacctgattaacacagtataacccagcatttcccatactaccctgaccataaccatcctttcttgttgttggggggatacctgggggaagacctattgccatcctgaaggatgtcttaaattttttttttttttttttgagacggagtctcgctctgtcaccaggttggagtgcaccggcgcgacctcggctcactacaacctccgcctcccaggttcaagcgattctcctgcctcagcctcccgagtagctgggactacaggcgtgcaccaccacgcccagctaatttttgtatttttagtagagacagggtttcaccatgttggccagggtggtcttgatctcttgaccttgtgatccacccgcctcggcctcccaaagtgctgggattacaggcgtgagccaccgcatgtggcccaccattaaaattcttaacctaaagaggataattcccatgaaaaatggatgctatgggtcaattaaataaaatcaaacaacacattttatcttgtccatgttttacaggtgactaaaataatggttaatgaggatagcttttataatgggcaaaataggccatgacttggagtctctagcttgctgaagctgtgtgcctaactctcaaaaaatctgcataggatcctcaccttagaggtgaacagactaaagccctagggcagaatatgtctctacattccttgaaacaagtgtgaagaaaaaaaattaaagaactgccatcatgaattgtactaaagccatgatcaaaagtctctatactttgaaacacctaatcatattagaggattaaaaacacatcagtgaacgctaaccaattatttattcatttccatatcttttaattttgataacataaatactgtggttttttttctcaattataccgacaaaatctttctcctaccttcagtctgagaggttccttttgctgtaatatcttgttgttgtacttggcctatagtctttgcgtgcatctttttccataaaagaagacctaagggtcgtgaaagattaagaaaaattcagatgagaagtcttatcttttctaggaataatgaaaagtgtataacctttatttgaatgttagacttattttgtgttctaaggctctactgttgaggccatataaaaaggtcatacccttagaggtagacatgaccttttctgaagaaagtgcacattctctgtatcacttgtctgggaggggcaggtcctctgacaggtaatagaatcttgcaagatgggttttggtcttcagcaaaaactcctgacttcctctggaatcatgttcttgctggactttcaggtaaatggattatttgaggatgctctctggtggtatggaaaagatggcttctcccaggggctagggctagttaagaaggcagtacccttgcaggggatcctaaaaatgaagtgataaactttcagattatctagctttatgtttctctatgttcattctcatctggctatgcccaaacctttagtaaagtctgattattatactttggtcttgcttaggtccgagttgtgcattaaacaccatgagaatttggagtccatgtttgggccaaagggctaaagaatagatggtagaactcgagttaacatagagatatgtggttatggctattactaaggaaaataaccatcagttatgtactctgtgcccagcatttcactatgctatctcatctaatcttcacaagaattctcaaacataggttttattagtcccattttgcagatgaggaaactgagactcagagaaattaagtatttggatatatcctatagctattgggaggtggaatttgaaccgaggtttcatctgactccagaggctgaacatactctagtcaagttacataacttctcataccttaagttttttatttgaaaacatctgccttctagggttgctataaggattccatgacacaatgcatataaagattctgggccattaactagaagataataggtatcccccaaatagtgcttatccttatgttttccttctgcctttctggccattccttcttaatatccttcaagggttccttttcctctgatgacctgttaaattggtgttccctaagtttgttcttcaaatgaacactctccttgagtgacttcatccaaacccagggcttcagctactgtttttatgctagtgacttctaaatctgaacctccaggctagatcactgctgacatctctattggatgtctcacagacatatgaactcagtaagtcccaaacaacacatctttctgtttcactcttggcctgtctctcagcaagtggcatcactgaatctctagatacctaagccaaggcctgggaatcttcgtctactcattctcagtcatcccttacactcaattagtcatcaggttatcttaagtctcccttcttatcatttgtatcagtctctccctctctccctatcctccctcaatttcatttccacagccactatcactgcctaaattcaaactcatcacgtctatcaggcattactgcaacagtctcctaactcatttccctacaatttacccaaccctcctatctgtcctcaatattactgtcaaaatgatctttctaaaaagcaaattcatattatacatttttcacttaaaattctttcaagagcttcccatagctttcaggataaagttcaaattcagcacactaagcccttcagcatatagctgctccctacctctttagctgtattttccactaattctgtattttttcatttgcaccatttgtttctgctttgaaggattacttgaacttctctaaaggaagctatttctagccttgggccttcaggcatgtccttgggtgcctacccatccccttaactccaaaatccccctcaactctttccttaaagctcagctcaagggcattcctctggacagttttccttgatgttgaccctggtgtttctgtttaatgctcccatgacacctgtgcattgctgtgtgacagcacttttcatactacacatctctgtcactagtttgtaaatggaccccaaagtttactccacattgtgtccccattacctaatccctagtgcctagctcataaccaatgcagactgctggttaatgaaggagtgaattcaggaagagagttttaaacccttggctatgttgtgtgtgaacctaagaagctggctgggcatggtggctcatgcctgtaatcctagcactttgggaggccgaggcgggcagatcacttgaggtcaagagttcaagaccagcctggccaacatggtaaaaccccgtctctactaaaaatacaaaaaaattagctgggcaagatggtggacacctgtaatcccagctacttgggaggccgaggcagaagaatcgtttgaacctgggaagcagaggttgcagtgagctgagatcgcaccattgcactccagcctgggcgacagagagagactctgtctcaaaaaaaaaaaaaaaaaaaaaaaaaaaaaagaagctaagcgaaaggtaggactttgagactttgagttaaggtggcacgttactggagattccttaagcctcattcctcctacgctcctttcttttccactttacttatggccaggttccaccactcaccctaggaacatgaagacacaacaggttttagacacactctatggaacaaacaattaagaccctgagtatttcatttgctaggctagggagataataagatagtctgattgggacctatcagtggaatacccatcctgccctctacaaacttgagattcaatattcctgtgaaaacctgaaccagaggctgagctctaaaagactctgtttggttttattttcactggagaaactggatacatttttatgactttagtcgatctcttcactttctgtttttccattttttcagatctttctggatgttttcaccttttgaagctgtttcctacctctttccgaaagtaatagagagaaaaagggttaaaaagaaggaaaagcaaaaccaactaattcaaacgttaatcgaatttttaaaaaagcttttttgttggggagagtctctgagttggaaaataccttaggaatcatagaccttacccaataactttagttagtaaataatgagatgaagggaaagaggttactgacttgcccaaaaccacttaagcagctgaaagcaagagtattttggcccgaaatcctccaagttcgtttttgcaatcttttccttgggagactctctatacttgcgcccacagctaatacattctgtctatgcaagcccaggtaattggcaaacgtatatttattatatctaacatacattatatataattataaaaaacatatgaccttatcacactaagaagagaagaggccacattgtcgatgctcagggctcagattcggctctctatattttgcccctgggagggtaagaaaggttgccaaaggacctcaggctctcggacaccaggagcctcgggctgcacggaaccactgctcctctagggcttggagggaaagccaaggccgcgcctgccgtagacagcagatggcctgagcaacctggaggcgcgcccttcagtgccttccgggaactggttaggagtagcctgcggagagccgcgcttgcctcactttccggcgccggctcatggcttaggggccacagatttggggctcgggcggggctctgggcacgtggccggcgggcctgggtgtttgcctgagtcccgcagccgcggcccgggcgggcagccagacaggccgtgcccaatgcttgcgcgccctgctcgcgccggggcattttacgagcctcgaccgctgcccccaggtgctcacaaacccccgtgcagcctgtaagaagcaccgcggcccagtctctgaatctccgggtgaaagaacaggcttgtctgagaaccaatgtagaaatctctcctgtttcaccgacggccaaagagggccttcggcttgaccaacggaggaaaacgtcttcgtgtggagatcgatttcctttcgagagtttattctatacctgtgcagcatcttttgtgtagtagaaactgttttgcactgtgagtaaaaaagacgaagttagccttatgtgggggggcggggcggaggcagcttatttccacataaactaagaaacaattaggttaaaagagtgaggagccgggcgcggtggttcacgcctgtaatcccagcactctgggaggccgaggcgggcggatcacttaagtccggagtttgagactagcctggccaacatggtgaaacgctgtctctactaaaaatacaaaaattagctgggcgtggtggcgcgcgcctgtagtcccagctactcgggaggctgaggtggtaggatcgcctgagcctgggagaagaaggttgcagtgagccgagatcttgccactgcactccagcctgggcgagcaacagaccctgtctcaaaaacaaacaaacaaacaaacaaacaaacaaagtgagcgctcaaacctgagtagggcgcctgggggcaagcaagcgagggggagtgagattaagtggagaaagcgctaaaggggagggttagagacgtgagaggggagcggttaagagagaaggaagcggagggcaaggagacgtggggcggggaagggagggcaagatgggggggctggaaggtggagaactaggccgggtgctgttcggcgggagtaggactaagctgggaagacgcgggtgggggaagggctgaagtcggcggtgatggaagggctgaagtcggcggtgatggagaagggatgagaggcctaggcctagttcgtgtccatgaagcctctccacgtggccgacttcccttagagaagtcccacaagccctcagccctcacagcctcgcccgcgacgccgtgcccacccctcccctggcagccccgagactctgggcgtgtgcttcccgctccccgagggccttaggcccagcggacgcccggccggagcctgatgccggcggcctccccctccctcagcgaggcacgcgcgtccccaggaccgccggtgccggggcctttaaccctggccgccgacgccgcggggaaaggaagcttctgcggctacagatggcgcaggccccaggtcgcagagaagccctatccaactctgcggactggccctgggagaaagggcccgggagttgcttctccagtcggtgaacgctccgttgagccacgtctatgcgcttgctcatggataagcgcactgggggactatactgcagtgtgaccgccagtgtccccagggaggctgcggaaaagtagaggcaatgagacccgagcagaaatagggacttctcgcggcagtccgcacggaagcagctggggagcatccagctcgaccctccccacaggcccagggtcgggacaccgagggaaggcgcggcgcgcgcggcaaggccaggggcgcggggctgggctcggccggcacaagtgctcggaccgcggagcgtcctcggtgaggcgttcggtatggattgggtaggagcggccctgggcgatgggcctgacgtcggtgggcgcagttgaggccactgcaaggccgctggatcccggatccgcacccgagacggagcgggggccacacgggataaccgagggggcgaacgggagtttcgggcctccgctccctctccgggtgggggacaggtcgccgagtccgaggtcgggcgcgaaggccactcgcattttcccgccttccgcgagcaacccaggggccctgcgggaggaggagagggtcccgggagtccgcccttccctgcgccttcgggaccggcaggaggcgctgcgcgggcgaattaaaagaaaaggaaaagctcgtagtggaggtgttaccgcatcctgcctttggacgctactcttagttgagtgacccgattcggaccttaggggcgttagggtctcctccaccgcctccctcccctgttaaaagtgtgtgtgtgtgtgtgtgtgtgtgtgtgtgtgtgtgtgtgtgtgtgtgtaaaatttaaaattttagatatgctgacataggcacttaaaggaagggtgtaaggcagacattctaatccttgactatctgtgaagggctcgcctatgattgccattttttaaagatcctaaggttttataaacactgtcttataagacagacacattcgtaaagtttgcttctaattcttttgttgaaataaagatttatataagaggactatttctgcttatttctgagagaagatcacatatcagtaacagaacaaggtaaagtacctgtacttccaatatgtaattggaattccagtgtatttattataatatattatagtatacttagagcatgcattatattctaattgtgtaacagttatttgtgtacatgttttatcttgtcttctagactgtaagcttcttgtgggcagagatggtttttttgtctaacacggtacaaggcattgagtgaataaaaccgaaactgtctccatttactatccaatgtgaattcatataacttgcttatatattttataatgtataagtaaatataaatttgccctagaaaaataacttatacactcaatattgttcataatcattttcagtaggagaaaaccaattttttgcttcatgatataaaattcagcatttggcattatatttactgcaactgttaacattaaccttatatagagcaaaagttacagggatttttggcataaccttttatgactaacaattcattcaccaaattacaagtacttctccagactataaagagcagaaatgtatgctataacaagactgttgcatatatttttcaaggactgattaacatttggttattacatttattttttaactctataaagaaattagcagtttaatggcaagattttaaaaaatcaagtcatcaggtttttttaaccagtagaaaatcatttgaggcaaaaggagtttttttattttttttcagcttcatttattctgcttccaaagttggtaatgatttggtcttagtggaaaattcttacttttcacaccagtgattttatatatatcctactcacagaagtgtaccagggatatatatatatatatagatagatagatatttgttgactgaaatttattctgtacccctgcagaatgggcactacatatgggctctttggaataatattcagtagttagtttgttgggacatttgattcgtatctttttttttttttggatacagggtcttgctctgttgcccaggctggagtgcagtggcataatcactgctcactgtgatcttgatctcctgggtttaggtggtcttcctacctcagcctcctgagtagctagcaccacaggtgtgtgttgccatgcctggctaattaaaaaaatttttttgtagagacacgatctcactatgttgccaggctggtctag

SEQ ID NO: 24 - DNA, 150314 bp, Homo sapiens
gtagggagactgatagtaaataattaatcatataataaaatcaacagctatagtagttccaaggagagactcatggttctgtgagagcacacatggtagaggaacttgacctagtcagggggtggggacgaagctgaaacctaagcgctaagtgtccagcaggactggggttcagaatgcagtgctttgagcagtgctgacagtagatgcaaaagtcatcaagaaatttaaagtacttttgggaaaacgaagtatgtgtaccataattagtcatctcaaaaagtcaaaaatattttgctgtgatgtagactaaatccatcggatggtttgcaaaacaaaggttaggactccatgctgcctggaaaaatgattaaagactggatgtctgaggccgggcatggtgtctcacgcctgtgatcccagcacttggggaggctgaggagggcagatcatttgaggtcaggagttcaagactggcctggccaacatggtgaaaccccctctctactaaaaatataaaaattagccaggtatggtggtgtgcacctgtaattccagctactcggaaggctgaggcaggagaatcacgtgtctggatggataaacactttcattcagttaaacatgttgatcatatcagagcattccagattccacatacctgctaagcaataactaaggcaacggacattgacccacgttacagatagtaaagctgcatcagaaaagagccttaacaacttgattagagttaatgaaagatacttcaagttgttctagttcatcttatctgctcttccctggaaacctggcaactcacatttttagcacttatttataagcccctttcctattgccgcaaaattctacaggctctgtagaaatggggctgagtctctaaataatcacattttgatggtaattaaaagccaaattccctaactccctaaatgctatgagcagtttgaatgcctgtgttttgtcctaacattgagcatctctacgaagaaggaaaaccatgttagaaaatactgaaatgacttaattgcagaaagaggcagccttatgatgaagtagcagtgagcttctgctgggatggtacactcaggggaggaagctgctcacaggaagaacgcccaggagcgctggcctcagcccttcttcaagtactcactgctatgaggcctgggccgaggtcctacaggccaggagaagccctaagatgacatctttctgctatggtgacaagtccttcccattgactctaatagttgttaaggtaagagaggtaaagaagggaatttcagttattaaggcattagtttggattggagctgggaacaaaggaaaagccacaactgggcttcatccagcaaagacactattttcatccatctgcctcctagactaatttagggattacaggacctacccagggacctccgatgcagcaaagtaaggatcatattgtgaaggtagaccaggccaaaccattgccacctctaactttaaggctgctaatctcttagaaaaaaactggaagaaaaagttggagagggcagtagggggagaaaacacacacacacacatacacacacacaccatatatatatttaaagaccaccaaatacatttttcatctttaaatcaaagtcctgcatagaaaaagaaagctgctggtaagtgttaaaggaaaggcttgttgccaataatataaaacatgtttataaaataataccttagcatgtagaaataacaatgataatgatgatataacagccacactgttgagagcacactcattcgctgaacactatgctaattacatacagtattgcgtcctaagtgtcacaatctgtaacactaatactatggtcccatttcacagctgcacaccaaggctgacagagatgtgataatttgcccagagttatatagccagagaagcataactagaacctgaacatagccctctgaatctgaagtagatgctgctgaacttcacttgcattttttttaccagcagttttgatgccatatggagaaataggtataaatgaaatctttcaaagcaatgagcactgaaaagattttggtgcccattgcaatgagtaattcaaataatgaactactaaaccttaaaatgcagaacttatatgtatgctatgctgacattaaaatggcttgtttataggttttctgattgctgcattctggataagataaagcagtcatatcctctctccccactgctttgataggatgctaagcacatgtaaagttgtcggaaatcatctcaaacctaaaacaccaaactaagtggcaggtctgctcagctagttgtaaatatgggcctagcttcactttattgcactttgcagatcttgagtttttgtttttgtttttaacaaattgaaggtctatggcaaccctaagcaagtctatcggcaccatttttccaacaacgtgctcaattcctgtctctatcacattttggtaattctcataatatttcaaaacttttattgttattgtatgttagggtgatttgtgatcaatgctctttgatatgttactactgtaattgttttgggatgtcacaaaactcacccatattaagatggtgaacttgaaaaatgtgtgtgttctgactatgctaccaaccagccatttcccctccctctctctttgggcctccttgttccctgagacacaaaaatattgaaattaggccaattaataaccctacaatggcctacaagtgtgcaagtgaaaggaagagtcacacgtctctcactttatttatttatttagagacggagtctcacactgtcaccctggctggagggcaatggtgcgatctcggctcactgcaacctccgcctcccaggttcaagcgattctcctgcctcagcctcctgagtagttgggattacaggtgctcaccaccatgcctggctaattttttgtatttttagtagagacagggtttcactatgttggccaggctggtctcaaacacccgacctcaggtgatccacccgcctcggcctcccaaagtgctgggattacaggcgtaagccaccatgcccggccgcatctctctttaaatccaaggctagagatgattaagcttagtgaagaaggaatgttgaaaggcatgacaggttgaaagctatgcctctcatgccaaacagccaagtcatgaatgcaaaggaaaagttcttgaaggaagttaaaagtgttactccagtgaacacatgaatgataagagggagaaacagctttattgctgatttggaaaagttttagtggtctgcctagaagagcaaaccatccacaacattccccttaagccaaagcagagtaaggctttttctttttttttttttttgtggggggacggagtctcgctctgttgcccaggctggagtgcagtggcgtgatctctgctcactgcaagttccgcctcccgggttcatgccattctcctgcctcagcctcccgagtagctgggactacaggcgccagccaccacgcctggctaaatttttttttttttttttttttttttagtagagacgggttttcatcgtgttagccaggatggtctcgatctcctgacctcatgatccgcccacctcggccgcccaaagtgttgggattacaggcgtgagccaccgcgcctggccaaggctttttcaattttatgatgacagagagaaatgtggaagctacagaagaaaagtttgaacctagcagaggttggctcatgaggctttaaaaaagaagccatttccatatcataatagcgcaaggtgaagcagcaagtactgatctagaagctgcagcaagttatccataagatcattgatgaggtggctttacaaaacaacagacatgcaacgtaaatgaaatagccttagattggaagaagatgccttctatgactttcatagctagggaacagaaatcaatgactggtgtaaaggtttggaaggacaggctgactctcttttaagaggctaatgcagctggtgacttgaagttgaagccaatgctcatttaccactccaaaaatcctaggacccttaagaattaacttaaaagctgtatatttagctttaaagctaaatctactctgcctgtgctctataaatagatggaacaataaagcctagatgacagcacatctgtttacagcatggttaactgaatattttaagcctaccgttgagacctacggcttagaaagaaaaatttcttttaaaatattgcgttcgttggcaagtcacctagttacccaagagctctaatggagatgtgtaagattaatgttgttttcatgcatgctaacacaacacccactctgcagcccatagatcaagaagtaattttggggccaggcacagtggctcatgcctgtaatcctggcaatttgagaggccaaagtgggaggaatgcttgaggccaggagttcaagaccaacctgggcaacatagcaagacctcatctctataatcaaaaaattcagccagactaggcatggtggctcacacctataatcctatatcatcctagcactttgaaaggccatggcaggaggattgcttgagcctaggagttcgagaccagcttgggcaacacggcaagacttccccccgccaaaaaaaaaaaaaagtcccagatggcagcatgcccctgtagtcccagatattcaggaagctgaggcaggagggtcacttgagaccaggagtttgtggttacagtgagctatgacagcaccactgcactccagcttgccagcttgagcaacagaacaaaactgactcaaaaaaacaaagtaattttaactttcaagtattgttattttaaaaatacattttataaggctatagctgacagagatggtgattcctctgatggatctgggcaaagtcaattgaaaatcttttagaaaggattcaccattctagatgccataaagaacattcataattcatgggagaaggtcaaaatatcaacattaacaggagtttggaagaagctgattccaaccttcatagatgactttgtggagttcaagacttcagaagaagtcactgcagatatggtagaactagcaagagatctataattagaagtgcagcctgaagatgtgactgaattgcagcaatcttataaaacttgaatggatgaggaattgcttcttatggatgagcaaataaagtggtttcttgagatggaatctactcctgatgaagatgctttgaacattgttggaatgataacaaaggacttagaatattacataaacttagttgacaaagcagtggcaggggttgagaggattgactccaactttgaaagaagatctactgtaggtaaaatgctatcaaacagcattctctatggagaaaacgattctttcatgaagactacagagaagtctctcatgaaaggaagagtcaatcgttgcggcaaactccactgttgtgttattttaagaaactgtcagccaggcacagtggctcacgcctgtaatcccagcactttgggaggctgaggcaggcagatcatttgaggtcaggagttcaagatcagcctggccagcatggtgaaaccccatctctactaaaaatacaaaaaagaaaattatctgggcatggtggcctatgcctgtagttccagctaccttggaggctgaggcaggagaatggcttgaacctgggaggcggaagttgcagtgagctgagattgtgccattgcgctccagcctgggtgacagggcaggactccatctcaaaaaaaaaaagaagaaagaaagaaagaaaagaaagaaggaaggaaggaaggaaggaaggaaggaaggaaggaaggaaggaaggaaggaaggcaggcaggcaggcaggcaggcaaggcaaggcaaggcaaggcaggaaggaaggaaggaaggaaggaaggaaggaaggaaagaaagaaagaaagaaagaaagaaagaaagaaagaaagaaagaaagaaagaaagaaagaaagaaattgccacagctaccctcactttcagcaaccaccacttgatcagccagcagccatcaacaaggcaagacccttcaccagcaaaatgattatggctcaccaaaggctcagatgatcacaagtacttttttagcagtaaagtatttttaaattaaggtatatatattgaggtttttttagacatgttattgcatacctaatagactacaatatagtgtaaatataacttttatatgtactggaaaaccagaaaaaatcatgtgatttgctttattgtgctctttgttttattttcgtggtctggaaccaaacacacaatatctctgacgtgtgtcttagaacttagtgttcaaaaacagaggcacaaaacccagccactagttcaaaaccttccccttgggaggctaagtggagactgtagaataaaaatgaggaagaataagtcagcaactacacaatatatatgtatttttaaaagaagaaaacaataattgagagatggtttcatgatcttctcactactcctgatttggaaatctggaaagtgtggtatgggtatgagggggattcttctagatggatatgttaggtgaatccttgtagggtagtgcaagttaaaggtataacacacccaactgaatgtacattcatggtgtatacacatatattgcttctgggtttttctatcaaaagcaagagccaaaagaaaaatactcaacaatgaaatgtgtccagtaaccttattcttctgagatattactgtctattttgttactttggaagctttttggttttactgaacatatattttgattatatgcatatgcatagtatttaacatcttttcaacatgaaaagtgtccatcaatggatgattggattaaataaatggtggtatgtatgtatataccatgggatactaactcagccatgcacacacatagaatgaaaatgaggctgggcacagtggctcacgcctgtaatcccagcactttgggaggccgaggtgggcagatcacctgaggtcaggagttcgggaacagcctggcccacatggtgcaaccctgactctactaaaaatacaaaaattagccggatatggtggtgggcacctgtaatcccagctacccgggaggctgaggcaggagaattgcttggacctgggaggcggaggttgcagtgagctgagatcacgctactgccctccagcctgggtaacagagcaagattctatctcaaaaaaaaaaaaaaaaaaaaaaaatgaaagaaaatgaaatcatgccttttgtagcaacatgggtggaactggaggccattattctaagtgaaatgactcagaaagagaaagccaaaaactgcatgttctcactcagaagtgggagctcaacaatgggtacacatggacatacagagtgaaagaacacatactggagactcctcaaggtgggagggtggaagggggatgagagaagaagaaatctacctattgggtacaatgtccactattcagatgatgggcaaactgaaagcccagccttcgccactatgcagtatgtccatgtcagacaactgcacttgtgccccctaaatctatttcaaataattggtgattcagtatgtcctttgtaaaggaaagagtatctattacatagataatctttgccagggactatctgcggttgcaaattggagaatcacaagcagtatccttctggcagatatatttggtttagtccctgttgaatctaaacatttttcttaaattaattgccaacattttcaaatcatgagatttcatgccaaaatccggatttcaggcatctcatgaaaaatgggaagatttggcagcactggacctgctgtactccctcacggcaaattagcagaagctgagctggcttgattcatttattacatcacttacctggcccctgtaggcatctgagttagtaacccctggtctacaggtaaaggggctaaaggtcagatacaactcatctcagatgctggaagcagctttcttagtcgaaataagcagctgtcattagtccaaatagggacgaacgatttgactttaatatgaaatgttttatgtgggctataaaattatccaaactcgacacaggacattttgagcttatttccaaatcatctggccttcatctacccactggaactattactctgctgggtcctcatggaaacatatctttcagccctaacaatgagactacagacatctacgtccccaacacaacagctaaaaagcagtagaatgtcagaaaggctatccacttagcccttggctgacaggccccactgagcatcctttgcgaagtccatttactagctaattcataatttacacaaggcattcagacatagcagctaagatataaaacatttatcaacacagggactagtttgttattttaaaataattatgtttaagtaagccaataaagtctatcttctccaatttacttattgagctttatgaggcaatttaagtcccgattttggggggtatgtatgaaaggagagcatggaaatgccatttgctccctgaagtttttatcttttttttttttttttttttttttgagatagagtcttgctctgtcacccaggctggagggcagtggcatgatcttggctcactgcaacctctgcctcccaggttcaagtttttcttgcacctcagcctcctgagtagctgggattacagatacgtgccaccacacccagctaatttttgtattttttagtagagatggggttttaccatgctggccaggctggccttgaactcctgaccttaagtgatccacccacctcagcctcccagagtgctgagattagagatgtgagccactgcacccggccttgaagtttttgtcttaaaaacccagatcctcaagagaagaccaaaaaatggttgtggtgctcatatctctgagacatcttgcagagaggtaatccctaaatgatgcaaatctggtgaacataatgcacacaggggacaaaccaaacggtgaaaactgatgttaaactataaattttaagccacggacattagtgtgaaactttacagcttcaaactttcaaaacccacacaaaagaatttgtacgacactgatgaaaatttagacactagagatgctcaatcatgcgctctgtaagcaaatcacacttcatggttaattttgttgccagcaggataataaagtgtgatacaaactctagcacagtctcagctgctgttaaagagtctgaatggacagggcattacaatcattaagaatgcagccacgcaattcaaccagtagatggggcacatccacatggcaagcgtcctcactgaaccagccaggtgggaaagaataggccctgcttcctgctctatagccccctaccaaagagttacagagatagccaaatgcagaaggtgaggctgcacctcatctctaaaagaagtatttgattatttccttaacttctctttcattcctatgacaatgtaaataaaacgggtggagactggtgggattaggaggaatcagggttgaccacctcagaagggagaaatatattgaatccactctataaaagcacctccttcagtagtcagtgagtcgcttattcttactggggaccagtgtttactgagtgctcattccatccaggcactgctggaattggatgttagatctacaaaggggaattagacaggaatgggatgtggtccgtggagactgtggcttactgacactgaagtcctgcaaatgccagtcacctgtggctacaaatcatgacagggaactaaacaggtgggcgtgagaatgcttatgggtggacagtggcatctcagtaaagatggggtgctcagaaatgccctctctgaagaagtgacattgaaactgagggctgaggacagaggagaagccagctccctaaagggagctgtgggaagaataattcgggaagtggaaagcatgtatgcagagccccaggttgcaacattctggacacactcaaggaacaatggaaactaagccagtctgggtgggagtggtggaggtgttggcagaggaaggaagggaagtgatatggtcaaaggtatttgactaacagggcagtgggcgttgttagctttgatgcatactcatgtactccacagaaaacacaaacacaaaattatatggtgcttaattttccagatgctattttaaactttttacttatataaccttcacttatttctcacaataactctaaaaggcaagtactattagtatcatcctctttttacagagcagaaaacaagtacagagaggtgaagtgacttgcccccagacacacagctactatgcactagaacccagactggaacggtagtggtctgattccaaagtgcatgctcttcacttctatattctcagaagcactgttttatttcaaggtgactctgtatattttgatatcactatgctaagtctaggtttttttttttttttggcatgtttgttgtttgtttgttgttgtgacacttttgtattgctttgctggcagacggctgatgcgggccaaataagaaatccacaatctggcacagagtacacgcctagacagatttatcatatgtcctgataatcaagcacaattgtgtaccccaacctttgccagatgccggcttcctcatgaatctgggttctgtacatggactccccaaaggacagtaaatcagcgcactagatatctctgcaaagtttccagcagatgcttgtcctgtgcttaccctgcccggctccagatggctccacatcctgctccttcctctcgcgggcacttcagatatgtcagcaacgcagggtgaggaagaaggtggaaggagcagaactaacgtagttctttaagaagccccgcagagcccagaggtattttatatatgcatatgaggagctctaagcccggtcagcataaatcactgccagcttttactacctggacccgattttcaaaaggatgaagttgtttacatgttgcagaaaaggtttctgctaccagttaacctgtcacctgctacaattcattccaatctcttccataggcaacaggttgtatggaattttcctgcactgacatattagcaagacaattctatacctactccgtcctctcaaaagggagagaacaacgctgagaaataggtcccagcaaaaagatgttaagaaaaaattcttaaagcgtatattgcaaatcaacaacaaaaacacaaaaatcagaaaaatttttaaaaagacttcattctttcccagactaaggaacaggtttacacacttttctttctccctaaattaaaagtatccttgaccttatccagtgatttacacacacagcactgtcactaagttttgcttgccttttttgggaacagtctagaccagggtgtccaatcttttggctttcctgggccaggatggaagaagaattgtcttgggccacacataaaatacactaacactaatgatagctgatgagctttaaaaaaaaatcgcgatcaggagcagtggctcacgcctgtaatcccagcactttgggaggccgaggcgggcggatcacgaggtcaggagatcgagaccatcctggctaacacggtgaaaccccgtctctactaaaaatacaaaaaattagcggggcatggtggggtgtgcctgcagtcccagctacttgggaggctgaggcaggagaatggcgtgaacccaggaggcggagcttgcggtgagcgcagatagcgccactgcactccagcctgggcgacagagcgagactctgcctcaaaaaaaaaaaaaaaatcgcaaaaaaaaaaaaaaatctcataatgcttcaggaaagttatgaatttgtgttgggccacattcaaagttgttctggtctgcatgtggcacaagggctgtgggatggacaagcttggtctagataatccctacttccttcctcttctccaaagatacacagatttttcaaaaaagtagaagctgtttttttttaaaaaaatagagttcataacactagtattcatttatttgcatcagaaattaattaccatgacagaaacccaaatgaacatctcagagccaggtgtgtttgagatgagctgactgactccatacaaacacttgttgattttgcttgaatcctctgtaaatttcacttcccacttattagattttcacagaggccagaagacccaaataaaatcttctttacttttttgagacagggtcttgctttgtcgctcaggctggtgtacagtggtgcaattatggctcactgcagccttgacctcccggtctcaagcaatcctggcacctcagcctcctgagtagctgggactacaggtctgcaccaccaaatctgcctaattttttaaaggttttttgaagagatgaggtatcactatgttgcccaggctggtctcccttacttttaaccagtggtaaagaggagcctatgaggtcatcttccattcagtggtatctagactttgtgattatagagcgagaaaaacatccagtggacttacttagaaatgacttccttttgtcttatacttactgagagatttatttccttcatccttcttgtaacctggggggcctggagaatttcacactcattgttccctatcttcctcattctacagacaaatgtagttatagataagattatttatttctgactgtcaagactcatagcaaaacttgcttgtattacaatattcatcctgtctggagatgatggcactaatcgtataaatcgtgtaaataaccaggtgtcttcacagactgaaagtctagaaatgcatctaggttgacaaatatttacaccgagttatattgctttaatttaccatcagttgaagggagaagggggtgagcaatatcacattaataaaggaagagggtattagagcttatcatttcatggaggcttgtctttcttgtgtatattctcaacatacaagaagttaagccaggagcagtggctcacacctgtaatctcagtactttgggaggtcaaggtgagtagatcacttcaggtcaggagtttgagaccagcctggccaacatggtgaaaccccatctctactaaaactacaaaaattagctgggcatggtggcacgtgcctgtaatcccagctactcaggaagctgaggcaggagaatcgcttgaacccgggaggcagaggttgcagtgagctgagattgcggcactgcactccagcctgggcgacacagtgagactcagtctcaaacaaagaagttaaactattaaaatctgaaaaatactaaaaatatttttaattcaaaatataattttcaattaagcagagacttcacctcagagataactgataaaaactgaggcacagagaagttaagtggctgaccaaggtgacacagctggtgaaggacacagccaggactctaaccagctccacatcacaaacgtgctgtaatgagctactggctgcccagccagccgactgaacaggttgtttataaaatggagcaaatactatcaatcccacttgcccttagaaatgcccagagaattaaccaagctcaaggacagtggggatggcacagaactgactgtacaggtgtaaagtgtgatgatttatgcaggaactagctatcaaagttacggaaacctagaattttatccattgttgggtatctcccagtagtgcatgattagccattcttgacgatgattctgtgagctgttagaagtttttgtgtgtctaagtagatctgtctgaaactattttcaggttgtatgaatctttgtctaggaatttgcttccctggcctacccaaaaaaaaaaaaaaaaaaaaaatgaagtgcattttgttctgttcacagatagctttctttcttgctactcttggccataagaccaactctaaaaacattggtgaccctgaaaatgtctcaaggacattcagtttactttccttgcctctaagccactccttcttttaaaaaagaaagcttgaggaggctgggtacagtggctcacgcctgtaatcccagcactttgggaggccaaggtgggtggatcgcgaggtcaggagttcaagaccagcctggccaaagtagtgaaacctcgtctctactaaaaatacaaaaattcgctggacatgatggtgcgtgcctgtagttctagctacttgggaggctgaggcagaagaactgcttgaacccaggaggcagaaggtgcagtgggccgagattgcaccactgtactccagcctgggcgacagagtgagactccacctcagaaaaaaaaaaaaagcttgaggaaatttatagcccaggaaaatgagtggggaagagatgctatttaaatgtaaaatcactcctgctagaggtagtggtgggagtggggagagatgaaagaatggggtgggtagaagaaaatgtccgtccatgggcaattccatttttggctattccatggagacaaaccaattagtgtggattttcaaggtggtttgtgtgaactggctacctgcccattatgaattggactgggattaactagctcattccaaacactccaccaaacagcaaatggtcacaggaaaatgatttttagtcaccaacaacctggctggattggaaacttggagatgaaagccttgataacctcctaccaatctacaaagagactgtgactccttcagatctacccacttctaaatacctttttctccctgccctcttcattctttgcttttattccttaaaaagctcttttgcagttcggaggctgtttgtttttctgaacataaacatacctatcaaccaaccagcctggtaatggtcaatgtgtatgaacaccaccatttatgtgtttcatcatatgagcttgcatgactgcctcatctataagtttaattcaacccccggttctagaaaccagtttacttctaatagagaagccctgagaaacttgggctcaatattgagggcttcagcacacgactaatgccataagcacttttaattatctgtctcagcttcttacagctggaatttcccttgttccagacacaaagtccttaactttatattccaggctcaggaacttggctccagggatcaccaccagccaccagcatgttcattcattcttttctccaagcaaatgatccctacaccagggttaacaacctcatcaagagaggctaaggcgatttcagctgcaaccctctgtatgtggcatccctgtggcttcccaccttagataattgctatcctcctttccctcacctattcccttatggggagccactcagtccctttggcttaggtgggactgatcaccactcctagggtgcagcatgtgatctaagtataagccacaagcacatcatcatatttcccaggccacagtttttcagggatggtgttgggaatcattgaagccaatatggctggtcagcttctttaattttaatttaaaaatgttttgtttgtttgtttttgagacagggtctcattctgtcacccaagccagagtggagtggcacaatcatagcttaccacagcctcaacctaccaggctcaagaaatcctcccacctcagcctcctgagtagctgggacctcagtacatgccaccatgcctggctacttttttattttttgtagagacgaggtcccactatgttgcccaggatggtcttgaggtcctgggctcaagcaatcctctcacctcggcctcccaaagtgctgggattagaggcatgagacaagtcagtgccggtagtatctgcagtagaggtaggtagaggctatatatattcttccacacatcctcacgaccaaggggtatgttactatgaaaatatgtcacggaacaaatgttgaagtcctgccaaaattccagcccatagagcagggcctgatacccactgccaggccacattaatgctgatgtggagtagccagccctcaacaggctgcctcctggacttcctccactaacctggcctggggcccccaggacctccccggagccaagtgcctgccaaaaatctcactttttgcacaactctatgttccctgctgtgtgtgttctgcctggcgggctggacttcccgccagcgcccacaggcccccacccagtgtctgccccactttggcggatgaggcttctctccagacccatgtcctccagtttgctctgtgaaccccagtgagcctgcccaagcctgcctccatatccaccatgaggaagaatttaatgaaagaaaaccaatgtgccaatctctaatactggaacagaagttccaataggtggtgaagctcaatcttgcccataaatagtgatttatttgtttggcgcagaggattggaaggacaaactgtaagctcagcttcaactcagagctggctaaggggctggcagacaggtcaactctctgagtccaggatgcacaggaatgttctggtctcaagtgcatgatgaagtcaattaccagaagttttttaaatcctccaaagtatctacctccttgtcctaaactatgactggaaattcaaataaaacacacttagtaaatttccttctttttctggcaatactggcttttattgaaggatgatgtagcaggaacaaagttcattctcaatataacttatcactttatactatctacatcttaatgtcaaacgcaataatctctagcatataaatgctattcctgattttaaaataatcctatttcattaagctacattttaatggattctacttgaaaaggaagggtggagttcaaattccttagccataaacattcattttccctcatatttatatttacatacacacacacactcacacatatatatctccttgaaataaggtaatgttaggtgagtagtacttttaataaatgtagttccaaaaaatcaaatcaaatagtcctttggatcatgaattactttgtaagattcagaaaaatactcatttttctatgagagacaaaggaagaaaacaatgaggtgatgttgctacccctgttgcgagaatcaatgtcccccaaccttgaagcactattgatttcaaatgaaaatgttgtttctgtagttttaagactttgctccttactttaaaaaaaaaattaggaaaatgaaaaaacttcatctaaagatgaccaaactattcaattatttccgtgatggctcatttctcttaacacataaacaaaactaaaactgaaggaattagatgtgataatgacatatctctcaaatctcatggtaaaattggatgctcagtggcattaaaacacatctcccaccaataactttcctctgtgattgccaaggtgtaggtctctcttattcaaacatctgagaattgttatgtctgagcatctgctcacattcaacatttgatgctagtctgttatttgctagggactttcctaggcacaggggatacaaaggtgatcctctgagctaaaaatcagtgtatcaacgggcattaagtagaaggagcaaggaggggtctgatgttgatcttgggtgcaccatttgtttccaaattctagcaagttgtccatcagtctgtactatttaccctagagtgaattgtggacacatggctcattcataatcagtccttagctccatccacatttattttactgtcatgcaacttgctccagagtaggaggcctcttcctactccaagtgttagaaaatacagatgaactttaccattccacaaaggataaagggattgggagcctgttgaaagcagggacagtatcactctacttggtgtcccgtatccacatcaggactcagtgggtataccataaatgctttgtcacacacacacacacacacacacacaaaagattgaaggaataaaaaacatattttttaatgatccaatttaaaacatcaccttagtattataaacagcattcaggggaataccaactgagtttctattctgcagaagggtaaagcaatagagagaaaaaaggttaaaagagcaaatctctagccgatgtaactgggaaaaaaatgtaaaaagggctgatctctaactccaagtcctgagcacaatctttggctgttgtatagaattttcctatgcattgcctgcatcttacagaagtatttaaaagccttccctaatctgcccttgtttagttttagctgtattctcccatggttttctgatataatcaaggaaaaaatcaaccctaatagtgttttcattattttacagtacaattattttgagagcatggaaccttctgagcatgttcctataacttcaagacaaaaatgcagtactgtttctttcaacataaatgcatgtactggaatactctggcaccaacaataggatcaaatgatagaactcttcgttcagaaagcctgtaagaagactttatcctcatccccgtgaggggcttttgcacacatctgtttcagctcagtcccctagagatatctaaaatctaattaaccaattaatttgcaaatatattctaatgtatgcaaggcagattttcttgggtgttaaattatctgacactgaaccatatacagtacacaagagcgggacctcactgaaataccacaagttaccccaatgcaagaacggctaggtgggctctggtccacaagcacttctattccctaatgagaaaatgagttaccatggtcaggttaggttgtgtgtgcttcagtaaggtactgctaaatgcactggtgagacagaggggtcatcaggcactctgaggcttgtcttctaaaactgcttccacagtatcccctagggtagggctggggtgggcacggttgcctggggccaaggaattggagaaaaaataagccagctcagtggctcatggctgtaatcctagcaccgtgggaggctgaggcaagacgatcactggagtccaggagtttgagaccagcctaggcaacatagcgagaccttgtctctgctaaaaataaaaaaaataataattagctgcatggggtggcgtgtacctgtagtcccagctacttgggaggctgaggtggaaggatctcttgggctcagtagctcagtagatagaggctgcagtgagctatatcacaccactacactgcagcctgggcaacagagtgagaccctgtttcaaaagaaagaaaaggaaaaggaagggagggagggagggagggaaagaaaaaataagatgatgatacatatttcacttagtctgttttcctagggtggatgaagggaagtttaagctatgggaagagtatgctctatcatactgggaattactaactgctattaatttgcatgcagaactctgttcttcaagaaagcagccacagcaggtaacattgtttactcagacaatcaagttgtaatttactgaacttgtggattaaaaaaaaaaaggatgttcttaattgctacattgcaacaatttatccagctcaatgactgtatagctacagataagaactcagaataacactatcaaatgttagggggattacctaatttacaaaatgaagagtatctcaatgcacagtgtgttgttacctaaaaatatggaatgtggattttaatatgtttctgataatatgtttggatagctgctaattgtgcagcattaaagcaaagctgattttgttatttatcttttattcaagacaaattattattttgattattcacaaaatggaaaagaaagaaatggcaatattatacaatgtgttttggtatcttatttctataatgtaaatttttctactattcaatcactttcaaagatctccaaacacatattaaagcgaatactgaagcagagaaaaaaaaaaaaaaaagaaagaaatgcatgtccagtttagggttgaggaagccaagatgggatttttacataataaatagattctaaattttcttcaagggttagggagaagttaaagagaaagagtgttagtatttgctatggtctgaatgtgtgtctcccacaaatttcatatgttgaaatcctaacccaaataccgatgggatgatgatgtggagcttttgggaagtgattaggtcatgagggtggaaatcttttttataaaagagactgcagaatgattcttcaccatctcagccacatgagaatacgatgacaagcccgcagtctgtaacctgaaagagggccctcaccagaagctgaccatgttggcaccctggtctcggactctgagtctccacaactgtgaaaaataaatttctattgttcattagcagcccaaatagactgagttcttacagttaaaacgtggattggtcaattcataatagttgcctaaaagggtaatctatatatgcaaacttctttctgacaacgaaactacaatttcccatgaagttgagaggggttaagaaaatggagaaaattagcaagtatggttaagaccaatgttgtcctgtgacttttttttttttttttttttttttttgagacagggtattgctctgtcacccaggctggagtgcagtgatgtgatctcggctcactataacctctgcctcccgggttcaagtgattcttgtgcctcagcctcccgaatagctaggattacaggtgcatgccaccacgcctggctaatttttgtatgtttagtagagacagggttttgccatgttggccagtctggtcttgaaatcctggcctcatgtgatctgcccgccttggactcccaaagtgctgggattacaggcatgagccaccgcgcccagtctcactttaaaggagagagttaaagtgacatctaaagatatgcatcccaataggattggggtgattttcaacattcatataaaaaatgagtttatcaacactcaaaatagatttatttggtatttctagtttgtttgtttaaaatgccaacaaaacataacatactatggctatcttcctccatttgaaaagacaagtaatgtggtaaatatgctacaaagtggcctaggagaatttcttaggtatctcctttgactaacatactttaatccttttcactcttgttagcctcagcattagtgtaggtgcaaagcagctggtgagtaaatttgggtataatgagccagtctagttcattctaacaatgagaaattcctaattttaaatggtcatttcttttttaaatagaaatgaacagagaggtacaaaaaggctttggtagagtatgtcataatgcataattatgaatatatattgtcaagtttgtatgacaatttagatctttaatgttttttccattatatctttttaaagggaacaatcctggccggacgtggtagctacaatcccagcactttgggaaggctgaggcaggcagatcacctgaggtcaggagttcaagaccagcctggccaacatggcgaaacctagtctctactaaaaatacaaaaattagctgggtgtgttagcacatgcctgtaatcccagctacttgggaggctgaggcagaagaaccgcttgaacctggcaggcggaggttgcagtgagctgagatcgtgccacttcactccagcctaggcaacaaagtgagactctgcctcaaaaaaaaaaaaaaaaaagaacaatccttttcctcaattatcctgggtaatttgatagatgagctatcatataatcccctcaattgatctactctgctactcatgtgcccacaaaaatctaggcagcatactactgacaatgtgagcttcagaaagtctttcatccaaatggattccaataccaatgatagaagaaactagtaaatatattccttttccatcttctttagtgtcaaagcacagatacaggtgactgcatcttaaacactgcccagttttcagcactgtttcatttcctgaattccttcttcctaactgtccattagcggctttgacaatagtgttagccagatagtctcctttctacacatataaggtgcaaaaataaaagattttaaactgcagcttgaaggaacaaagtattgttatgttggtcaggttttctatggattagacgttaaaaaacagtggcaatagaaatattggtactcttctctgtgagttgatatgaaggctggaaatcagccgcctaagatgatcatttaaaggtaggggatggggccaggcgccgtggctcacgcctgtaatcccagcactttggggggccaaggcaggcagaccacttgaggtcaggagttcgagaccagcctgaccaacgtgctgaaaccccatctctgctaaaaatataaaaaaaaattagccaggcatggtggtgcgcacttgtaatcccagatactcgggaggccgaggcaggagaaccgcttgaacccgggaggtggaggttgcagtgagctgagatcgtgccactgcactccagcctgggtgatagagtgaaactacctctctaaataaataaataaataaataaataaataaataaataaataaataaaataataaaggtaggggatggcaaaggaagaagccttagtatttgccccttctagcctcttgtttctaaaataacaggtgtaatttcagagccccaactgctaattccacatgcaaaattgttttaggcaatcctcccaatgcattctagagacttttcagggtcatttttatttgttagatttccacggtattcaagtttctaagtaagcaaaaattatccgttgccaagtaccatctttggggagaggagttgagggaagaagaaaaaaaggacagagaagaatataaagaaaagctgaaaaaacatagatcaggccccaagattccaggtttccagatgagcaaatgcccatctggcccttctccccatgcaagcagtgggcagtgaccgtgggtgcttactgcagtgggtagaaccagtttctaaattcaaaccctccaggcagggaagagggcaactggctagtgaaaagagaaatgctgaagactgaaagctgaactgaagctttccttagaacctaaagaacacaaatgaattcatgcaacaaatattctgagcacctatccatgccagaaactataagagatgcccaatatgtagagataaataatattcaggccttggcctaggggcactaagagtctaatagtctaaccattaatcaaacagcaacaataaagggtgataaatactctatgtggaagtgtactcagagtgtatcggggtatactgggacagagaagcatctaactcacaaggaatatatccagaggaaatgacacttgaaatgaattttaaatgacaggacttaagagacagagaaacaaggagtacttgtgtcaaaagagagaatgcaaaagagtatgccataatttagaactttgcaacagaaaaggcagaaacacagagcaatttatttcagaaacacccaaatttattttaaaacatactagactccagacccagagagtaaggatggatgcttataaaactgcttttttaaaatgttccacatatgtggtccaatgggaattttaagaaatgcattccattccttgttgataaaatagaatttgggttatttactattttgaaaaaagaattttctacctgctagaggtaaggacgtaggataaaataaataacaataataatgataataaatgggagatgtggggcatggcatagcatctatttataaaagatcttaacactttgtgttttctctctcattactttcctatcaggcaggaaagtaatgaagactgacacaaaattaaacaattactagtcactagtgattggagattcatttgtttaccattcattcttccacagatatttacggaagcgcgtattaagtcggaggccatctttctaaggtattagaactacaacagtaaacaacaaaattgtaaaggaatgtcacaagtaagctgaaatgccatagacatttcagctaccaggctgtgggaaaaaaggatgacattgaaataagaaaacgatatggccagccaggaacccgtttttctaacagagaacccctggatgtgcctcaaagctaactaaggctctggtcatgtcacagaggcgtgattaaaccagccctaatgactgagtaccttgaagactctggatgttaatgacagagtatcttttgcacgctgctttccttttagtcagttcatctttacccagtgcagactttaatgtttgcaaaaaccggaggccggcgcaactgaaatggtcaggccttccctagcctcatgagagaagtcgctgaattaatgaggaaccagatgtaggctcttcatagttggagccgccaccccaagaaaagctccagggaggggaagggaagtaagcaatggccaacccaataggaaaccttcacagggagtggagagcattttctggccagattctgcaacactgagacttgttgtctccactgtagcacaactacagccaagctgaggtgagaaaaaaataattaggtcccaaatctgcattaaaacatttttgcagggttttgttcttgaagtggaaaactgttcccacaaggtctatttttaaccattttattttaaagagatcagaaagccacttcatgttgaaatttctcagtggggaattttacagtaatgctacttaaatccaacctaacgatgacaaagcagaggaaatgagtgaatgggctaagtctgtggaaatatagcagcccctcccgcttaaatcaatgtcatggctcagagaggctgtgagtacaatatggtggtatatatgcttcctttctgacacaattcaaaagtcaagcagaatcctgaattttaggaaagtactagttcacagtcaactttttctgttaaacaacaagttttaatgtttttttctccctaaaattacgcaaagactactagtatttcaagtgattaaagacaccttggttataataaactgaggctatgccccttggtgatttcacttgtggtgtcaatttatttagagaaataaatattcggctaggtgcggtggctcacacgtataatcccagcactttgggaggccgaggtgggcggatcacttgaggtcaggagttccagaccagcctggccaacatggtgaaacccccatctctactaaaagtacaaaacttagccaggcgtggtggcaggcacctgtagtctcagctactaggatggttgatgcaagagaatcacttgagcctgggaggtggaggttatagtgaatagagatcacaccattgcactctagcttgggcgacagagtgtgagactccgtctctaaataaataaacaaatacatattcaacctactatccagagtcagattttctattagaggcagaaaaaggaatgtgattatcctgagtatacacttcagtaaaataaaatcaaaggaaaaactcattgaaaataaatgacatagcacatttcatcgaccaaatatttggtggtcatctactgtgtgccaggcacttgagatacaccatcaagaacaaacctctgccttcatggagcccttattttatcattaaacacacaaaccatgttgtagaaattagatgacctggcataaggttggccaagttgtttgtgattcagcttaaaatctctcaaagggctgaagtgaggagcattaaagaaggagaaagatttctagaacaaccaatctctgcagataagaatatccagtgctgtaaatgcaactacctcaatgccctttcttattctcatcatcaccacaagtccaggtttagaatcttccagtgattccattctagaacctgagaactataaacaggcacaacagtatgatgaggatgtcatgccagtgggctgtgttgcagtaacaaatgaccccatcacttcaatggctttcaacaacacatccattgagggttggctgtgggctatgctccacttcttcatggtgagacccacgctgtagagcacctggcctctgagacgttactgttttcatggcagaaggaaacatgagaatggtgaagccataaaatggcgcttaaagcttttcctcctaggtggcacaggtgacttgagctctcatttcattggccaaagcagataatacagctagatgtcaacagctcaagaatatatcatcctacaggcagcaacagcaaacaaaacactcagtgatgaataggttgtagcatttatcagaatgcaggtgactaccaaaaaagatgtggaaaatatttctaacccttccattttcccagacatgtgattactattaaattgtgagtgaatcttctgaagggaaactactccctttcatgtcataatttctccccagaccagtagcacacagaacgtaaagtgaaacaaaaacagagcctggagaagttagagaaaactaatttttctttctatggttagatgtcaaacaattcattttccccctcaatcattcctttccacatgaaaaaaaaaaaggaactctataatgtggaagactacattctatattttattttgtagctagtaaattcttcctgagatccacatggtactttatacaggcaggaggaaggagacaggttatggtgacactaacctcttgaatttttgttatgcatcaattagatgaaattagaatacaggaaagacataccttagcaattgcaatgggcatcactggcctttgtttcaaaagagtgaccaagcaactacaagaacatgcacaatctagagttaaggagtattttatgcattttccccccaaaacacaaaagagaactagaaatagttcagatcagtctctggtcactcctaaaaagatgtggtcctaaaacagatttgagttggtattatttcagccactttggaaacagcctaccacttatgattcaaaatccatacaccatataaggtgtgctttggatgagtctttcaacttttctacatgtttaaacatttatgttaatttataaataaaacattagggggaaataatgagtaagcctggaccttcagtaagcctgaaaataatgagttagcctttgaaccccaggagcaataattctctatgcataatcatgaatgaaattcccttaccatgtgggaatttttgacaacctctataacctaaacaataaataccattctacaagcaagtttggtcccaggcatgtattcggccattcatccaaagagcattttaagttacaacatgtgtgtagaactctgcttaccagttctagattcatttgcttcaagcaacatgccaagctaccaaatcaacaaatggtcaattcaccaaagacagcgtgctgaatgaccaattttctaaattcaccaggtttatgaacttgttcctttaaattatttatggagtttgcagtagtttgtatataatgggatggagtgttcttaaaattgttagatttctgaagttcatgacaggttttcctactgccttcatagtattaaaggaatggtcaattcatcaaaagctaaagatgattttgttttcttatgaatgtttaagatctagaaaaacgtattccataattagtaaccaatgagtcaccagaaagttttaaaatatatattgctatgttttgcctcttttttcttttttttttttttgagacagagtgttgctctgtcacccagattggagtgcagtggcacaatctcagctcaccgcaacctccgcctcccaggttcaagcaattctcctgcctcagcctcccgagtaggtgggactacaggcgcccgccaccacgcctggctaatttttgtatttttagtagagatggggtttcaccatattggtcaggctggtcttgaactcctgacctcaggcaatccacccacctcggcctcccaaagtgctgggattacaggtgtgagccaccgtgcccggcctgttttgactcttttatgaactcttttgtttgttgggtttatcgacctattaacctttttaggatttttttaccttatgcatcttttaacgcttttgcattactcttgttttggattaggtgtagtatttaagaacatatcttccttatacaataaagccatctagtagaaatcaagtgcaggtgactggaatgtatgctcaacaagggcaagttatggtctagttcagaggtggtaaactatggttcatgcattgcctgttttcataaatcaagattttttaaaaaacgcagcttgaacttgttttatgtatttctgtggctgctactacagaaaaagaaaaaatgtcaccgtttaatggttgcaatagaaatggtgaggcctacaaagcctaacatatttactatctggaacttcaaaaaaaagaatatttgggactagggatctagtttattacagtatccacagctcctggagcaatgcctgactcatttaggagggctacataaataccagttgaatgaatgaataaatgactcctggtttttaacaaatggctaccccgcattcatcactcatttcagtgcttactgtctcacaactcatgggctggtgagaggtgttggttcttcctagtgacacagaaattaggcaacttgagtcaaggggtaaagcaaaccacctctgtggttccaggactaaggccaattgtaatgcagatgattggtttgcggcaacgtaaaaaccaactcacatttctgcaaagactatattgggaaactccaaacacaactaagccggctggtctgcaaaaactcaagtcactgtttgtccctaaaaagaaaagaaaatgtaggttggccaatccttcttccctcttctgaaggttggcagtgattttgtggtcgaagtgatgagctaccctgaaaagtcagaaggaaaccacaaaacccacgcccattgctcctcctaagctacagctgctgctgcacacagcagaaatatttatattctgccagagatcccccaggactatcctggatagagtagcttctacagacgttattctggtgggaaatactacgaaaaagtcaagtgctgatcaatctattgggaattttctgccatttaacacctgttaaggaacctgtaaccagacaaaaccaagtgagctagaattttattgttgtttaatttaatttatttatttagacaggttctcactctgtcgcccagactggagtgcagtggcatgatctcagctcactgcagctccgcttcctgggttcaagcaattctcccacctcagcctcctgagtagttgggactacaggcatgcaccaccatacccagctacttttttgtcttttttggtagagaatgggttttaccatgttggccaggctggtctcgaactcctgacctcaagtgatccgcccgccttggcctcccaaagtgctgggattacagtcgtgagccatcacgtccagctcgtttagttaactttgaatggcaagtggcaggatggttgattggttggttgagaggtgtctagcagtcctactttaatttcctcttgcctgttaatgccactatgattaaggctcctttcctccccatccccatactaattcctaattcatctcagtaaaattccccagggtagaacaaggacacaaatcattactatgaagctgtaggggtaccctaagtcaactcattttctccaaagcaggaacactaaatcagtccttggtgcctatcacttttttttggtattctgggtataaaaatatgatatggcggccaggcacagtggctcatgcctgtaatcccagcactttgggaggctgaggcaggtggatcacttgaggacaagagtccgataccatactggccaacatggtgaaaccctgtctctactaaaaatacaaaaattagccaggcatgatggtgggggcctgtaatcccagctactcgggaggctgaggcaggagaatcgcttgaactggggagacagagattgcagcgagccaagatcatgccactgcactccggcctgggcgacaaaatgagactctgtctcaaagaaaaaaaaaaaaaaaagaaagaaaaaaaatgatacggcatcatacttttgttcaaagagaatttgttgtctgggagaaagaaaggcctaagcccatgtaatatcaaggttgaaaaaaatgaaaagaaattatgttcgaatactaatgcatactcaatattcagtgaggggttctaacccagctagcacaccccagaggtataagtcttgtctgacatcaccaataaataagagggttcacttatgtgatttgaatttttcttttgagtatcggaacatttaaaactagtcctgggcacccagcctttgaggaggaaaaagtcaacttttaaggttccatttgtttgacatcatcccctggtcaacttcttgtaaaacttctttggccgctacactgcaattcttgagattacaacttatttctaagtaatttcaggaaccatccgacaaggcttatccttattgccctggatggtgctgccaggaaaagcaatgataaaagctcatcaaaatcatcacagctatgaaacagccacagacaattccgaaaggctgggactaatccttgagtccactcagtctctctcctaaaggcacatctgttgacaactcttttctttctggctttctaagatccctcaataccttcatagcaggcaaacagacaaacccaaactagagctaatgtcagcaaagtccactagcgaagcaatccttgtaacgaagtgcacctggagagccctttggagtggtagggaactatgcaagcagctttgtgtggctgtcttttcagagaccacagatcagctggagcttagaccaggcagccgtctaacagcattagcaggtaaactgcagtccgacttgaatgtacattttaaaaatttgaattacacagtgtagttcctctgtaagaagacttcaaagttttcgtgccagaaaggtgcaaagtgacttctgccttcacatttgtgagcttttcaccctctcaaccagcttatgagtgtcacttggggatttggagagagtcggagggaggaaggaaatcttttctctttgtgtcttcagagagactcaggagattctgcttatgtacatagaggttaataagtgactttaattgaaaaatggccatacacttgaaacaagattttgctctgaaaattccttctatctgtttaagcatgaaaagaagaaaactaaatattatcataccttcctctcctttctccacgccattccttggcatctgctactccatcccagacagcaggaaaacaagaaagagtcttccattcccaaaagcccccaaagaagaatgaagggggaaagggattggcaaatatccctttggtgtcattgcttgggaaagagtagaaatctgtgacaagtcaagcctaccttcaggctgtccagctgttaaagtctgcagccacttggaggtgctggaggtaagtgagctttttcttagatgcaatcattactgccaaatgtagaaggtgggcagtcggcttcataccacccaaggataaacagccactgattacagtaaacacgcacagcaaatgcacatcaaacacatcctgcttcaaattaccgttgtatcattagtgtgcaacagtctctatacttttcttaacagcatgctagaaaaaagccccccgcccctcaaattctcttctattctgttcattgcactgaaatgaaactgtgtgaatcccactaacacttaaatattcacctgctgtgctgctttattaaacaagcacttaggagagtggtttgttgggaaaggggtgggtatagcacccagctacatgctgcaggatgaatgaaaaaggaacttgccatcacatcccgtcttctctccagctttctgtagcagcaacctggctcaatttcccttgattagcacaaagatttagaatcacttttcaaaaagtgctaatcagctttagtttcaatggatcgaaatacaacataaaagtggttttctagttaatacaggcctgctgattttttcccgtgagtgcagcattagagatgaatctaaaaacatagctacaaataggtgtttattttgaaaacatccaaaacatccagctaccatacactgttgaaggtgagaaaatggtgtcaaggtacagcctacctatcaatatactcttcaagataaataattacttatataataacttccctctaattcatttcaggacagaaagtattaggtactaaagaataaagcaaataaatcaacactcatcttaatgcattccttccaagtgccatgtatacatgtgaaagtaaatattttaagtaaatatcaaaagatgggaacttgcctagagatttacatgtaaatttaacagcaaaatcaaattgtcatattaagccaatgtttcttaatatctaaagtctaaagttgttctggcaatattaaccgtactggcaggggaggagaaggaaaccctaaaatagatttttttttccctgaaaatggaaagtaacagacaaaaaaaaaaaaaaaaaagaaagaaagaaatctagaatgtcatctttgagacacagtgatgaagacacatgtcagtgcctcctacaggtacaaaatggtaacataccattagaggaggggaaactatttcttggcttaaaatgtgatactgaagttcttcaagagactcctaccaacttgttccaccaagacttttcttcctgtcctgtctctgtatttttgatagccattcacatattctgaggaaatttagagcttctccctagtagatatcctatgaaagaattcattaatctttttccttctctcatatgtcactataatccacatgtacacctgggggcttcccaactccattatctctgtaaaagccagcatttctgtggactgctccagtggacattggccctttgacctttaatcaagggctggcaggagatcctagagtatggtggaatgagcttagaattttgagcctattgaacctggtttcaaataccagttaaaagttgcatgactgtgtgcaagccaattgtgtgacctctccctgaatctcagttttaaaatgtatacgatggaacaaataataaacacttcacgaatgagatgaatatatttactaaatacctgacatataaagatcaaaaaatagcaaaaaatagcaaaaatagcagtatatataaaattgtaccttgtaaatgagctggcttcagaataaagtttttgtttgtttgttttgttttttggtatttcaggaattaaatcctctttgatgtagtacaaaatggaaaccaccttatactgcactgaattcattctcatggtgaatgctattcactagggttccagtgttctgttagtttctttccattccagtgggagctctactagaaatactactacacaagtggcatgccagtcaatttgatgacacaaatacttggtgctacctgctatgtcccccaaatataaatgagcatgaatactcctactttcaaagacaaagcagttaggttgttgacttagtaaatagctactaaaacaaattgccacactactcaacttatgtgacggatgattctcctgcaagttggctaagcaccaaaatgtcaaattccaaagaaaagctacactttagagataaaaactagatatttacccagtcatcagccaccactgggcaaaatcctgcagaaactcctagatctctgccatctgcctgttcgtctcattccatgttcaaggcaattatgtccattcccatttgtcaatttcagaaggggtggtttctacctgctatgaagtggtgcttaaatgggcaaaattattcaagggcttcaatcttcctagctggaaaacccaaataatataggacagaggttaaaagcttaagatttaaaaaaagaaaaaaagcttagaatctgaagtcagatggccagagtttgaatcccagttttatgagttcccagctaggtgacttttggcaggataactgatctttctgtaccttaatatgcatctatataacaggaatgaaataaatcatagtaggcatgccattgacgatatagcctctgtttaacagttcaaccaagaaagctttcttgtcataaaatgggatcacctttgtcttttatttgtaatatataacaaatattgttatgtttatgttctagaccataccttaattttctaagatatctattggccaattatttttttaggtaggtctttcagaatagtatttacgtgactctgagatatttccttctccttgactaaggcaggagaaattttccaaaaatattttgtaaggagtttgcatcaagcaaaacatgtttccaggaacatcttcaacccttttttcttttgccttgagacacagtctcactttgtcgccaggctggagtgcagtggcacgatctcatttcactgcaacctccgcctcccaggttcaagcgatcctcctgcctcggcctcctgagtagctgggactacaggtgcgtgccaccacgcccagataatttttgtatttttagtagagacagggtttcaccatgttggccaggatggtctcgatctcttgacctcgtgatctgcccagcttggtctcccaaagtgctgggattacaggtgtgagccaacatgcccagccccctttcttactctttctattcattagtttctctctttctcattgcttatctgacctctctttttgatcaaatatccataatttaaaggattattatcaagaaactgataaaatacaataagactattatatttaaatataatgcctcttctcgggcctggcacggtgactcacgcctgtaatcccagcactttgggagtctgaggcgggcgtatcacctgagctcgggagtttgagacctgcctgaccaacatggagaaaccctgcctctactaaaaatacaaaattagccgggtgtggtggtgcatgcctgtaatcccagctactcgggaggctgaggcaggataattgcttgaacccaggtggtggaggttgcggtaagctgagatcacgccattgcactccagcctgggcaacaagatgaaactccatctcaaaaataataataataataataattaataataaataaataaatataatgcctcttctcagaccactaatttttaagaacatagtaaaagcaaaaagtctgcagacttgcagaacccagacaaacatgcagttcatagaaatacacatgaagtcattttcacagaggttatcattttatgctataatgaactgtgtcaagattatggtgaaaataaaaatgatagatgatataataatagattaaataaaacaattacattcatatagattcatggtccttgtggatggagacagcatgagtttcagatcttcaaaattggttgcttaacagcttgggaaatcggctgaataaagtaatataatagttctcattctgcaaaaccccaaaggccattgccacatagagtcacaccactatatatatatatatcctagaaaggacaacatgggttagttaagtgttctataaatggcctagagaaagctgaatgcttgctggacacccaggaacctcaccattttctgatctcagattttagctaaatgcccttaaaacatggcatctaaggaagccagaagctgatgtttctctttacggtggactctcttgggattccctatttctctgcttattcaagatctgttcgagttccacctcctccccatttgccttccatatcatctccagcccctgctatcatcctttgtctgaattctgctaatacatgttgtcatttagcacttaccttctgctcccttaactattatagtaagtaatgctgcctatcttcaaacctcagcctgcccatgcctgtgctctttctgctattaatgtactcaatctttctcgctgatgcaaaaacctaatctgatgatattcctacggtcaaccaagcacattccaagccctgatggtggttcaccaggagctcctgcagccacgtaagagggtatagaaagtgttatttccaagggagaggcccttctccattcctttgctatgagatggaatgcagttgtgatagctggagctggggcagctatcttggactccagcatgtaagatatgtgtttaaaatggtggagcaacaaagcagaaggagcctgggtccctgatgatcacggagcctcgttaccaggcctgagctacctaaattcaggtgagtgaaaaatacacttctattttgtttgagccactatttccttgagttttctgtcactcctagctatttatcaccctaatccacaccgtaactaattcaagtttttaaaatatacaccgtgagttaaaacacattcaacaaatttagctcagggactctctgctctatagcctgtaacggtgttagcatttttttaatctataagcactagaccatattttccttaaaaagctagagttatttctcatgtgatttcatatcctaggggacttgtacagagcctggatcaggggagcccaataaatctttgatgactatagaaagatatgtgttttacctccacaatgatatgcaagtacctaaaggtcagcaattttagtcatcagcatggctatacacagaaaaagtgcctcatatacctgttttgatattgctggcagattagatgtgttcatcctccctttctatcctcagaaaacagtatccaaaaattactttgcatacaatggcactatattatggaaggaaagcaatgtgccaaagttataaaatcatcgtgagatctaactacataggaaaattcgaacaacatctccattatttcactttacagcatagaataaccatgcgatttaattactctgccaactctgaaaaacctatagctgggttctggcacacaatgtacagtttttatatgaaaaaaatgataatttccctgacaaaaccacttagaatagctttcagaaaacatatgatcaaaatgcatgaaaaatttgtccccccaaatttactataaaattggcattgtatcttttacatcaacatgcaatacatactgtctatgctggacaacagagtaagaatagtaacttatttcagtggtttctgtgctgacttacatacagtagagattcactaaatattttttaacatataccaaaagtttgtatgattcaaaagttatttgaataatatcaaaagttatttgcaagtgataatataaagtttggatcagtcaatagtagtggtcctcaaccaggagcaattttgcttcccaagaaacctttggcaacttctagagatattttcagttgtcacaactggggaatgggtgggtgcttctggtatctagtgggtagaggccagggatgctgtttaacatcctacaatgcgcagaagagcccccacaacaaagaattttctggcccaatatgtcaacaatgtcaaggctgagaaactctggtcttacattggcttgaagcaatgcatattaaactcatagtaggcagggcaatgttgactttccaaatgacatagcaccttgagagttcaataaagatgaagagagtctatagttgttgacaatgacagtattcttagcttcttagcatagggaagcaaagaataaactgggtattcccaggttcgggtctcttgatcattccattaataacaatagtccttcatttccaccagtgaaggtgaaggtgtgagcaagttcaaggtagcaggtcctccaagatctcatcccatcttgtaagatctaaagattctataaaagcactcaacttttctttttagagatgtttttcgtttcagtgcagccgctactacaataactatcaccgttagcttgaaagagaaccagacataatggagggcaattattttctcctcttttacccacagctctccttcctccttcctccaaactactcccagtgccatgctatacacccccatcctgtgaccaggcctgcaggcccttctgttcccacagactctaccaagtttctcaggggatttatggtgacttatttaaatgcaactgatttgcccacaagggccaactcaaggaaaataatttccatcagccccatctttcctgagctttgtacacaagaacaccaaaaggcctttctttctttggaaaataagttccttttcctaattggagtcagttttactaatcaagattacaatgaggctttacaagcaacgttgaagaagggagcatttatgcaggtcagtaggggttttcctaaacattttgattacaactttaactgctctaaaacacatgtaaaactcctatcattaaatttaaacagcctgatgatatgccaaacaagactatgagaatggcaaataaattgctgtaatctgccatactgtcacttaccctgctcttgagcagctgtaattgactaataggataataaggtggcagtttacaaatctgaaagctatactcctttgttgagaatgcccttgagtgaaaaaaaaatgctctaagtcaggaagacagagtgggtgtgatcaaaatcatggccctggattcaatatatgtaaatatgcttttcctatgaactcaaaagaagtcactgaacacagttgtatgcaggggcagcaccacttgtcattgcgtttattgaacctttttatccctcctcacataaaaaatattcagaagagctttacccactctaaggaccaaggttaaaggcagcatcctaagcaggagtgagggcaagaaaggttttcttttttcttgctttttttttttttttttttgagacggaggcttgctctgtcgcccaggctggagtgcagtggcacgatctcggctcactgctacctctgcctcccgggttcaagcgattctcctgcttcagcctcctgagtagctgggattacaggcacaggctaccacacccggctaatttttgtatttttagtagaggcggggtttcaccatgttggtcaggctggtctcaaactcctgacctcgtgatccacccgcctcggcctcccaaagtgctgggattacaggcgtgagccaccgtgcccattcaagaaaggttttcttagcaccagtccactgatggtagaggttggctccatccttcttctgacagtggtttctgtttccagtttacctcctgagcattgaacatgcagagaaagattccaaacaccccagaactacacaggccactgctaagtgatgcttaaggacttgtcagcaaaggctccaatgcattcacctaggacaatgcccaaagtcaatgatctcacaaggatacatatgacatgaggattcttgccagcaaaagccagcttgaatctggtaagaaaactgctgctactacttctacttctactattgctgctgctgctgctgctgctgtttggagaatacttgtcaactgggagactgctgaggaagaagagggttgggaggtcgcatcaaactacagaaccctgtatgtcacagtgaggaatatggacattactgtgagtgagatggaaagccacagaggattttgagcagaggagagatatgagctgacttatcctttaaaaggattcccctggtggctgctgtgtggagaagagtttgtagttgggccaaggtgggaaatggaagcagggaagaagagagaggctattgccatggtccggtgagaggtaactgtggcttgcaccatagaagcagcagtggaggtggtaagaactggttgaatgctggatatatcttagagctacaatgaacaggatgtgcagatgagttggctgtatatgagagaaagaaaagagtcaaggacaacggcaaggttttggcctgaggaactcagagaaaaggctcgctttttactaagggggaaaactgcagaagcaacatattggggagggtgaagagacagaaatcaagaacttggttttgaatgttattccaaaatatcagcatgatcttctacatttaaaattgtgtttactgtttcatttctaaacattcctgagagagtagctgaaacattacagtacacattatatatgaatgtataggtatatgtgcgtgtgcacagaaggcaagaatggattgatggatgaataatcttccattcatactcttctttttctttccttgaacttatttctttcagaacagaaatatccacgatatgccatcatcttccttttccaagtgaactctctgctaaataaataacgaaaatattctaagtacaatcaagtaaaagaaaaacatgagcattttccaatctatcaacagatgaggcacagaaaagccatttggacagaagcaaaggtctccaagaacaacaaaagccacactgttaataccacagggttggataaacctgttccatgccaaggccatatggaaagcttacagggagaatggcacgaagaaacaaaaggcctttggaaacctctgaggattgctgggtgaaaatggaatttgggcagtgaggcaagaaggatccaggctgacctccatagggcacagtaacatcaattcaagatatttgcactcaagcaggctgctaaacccccgtgatgctgaacacttgagcttgtcccaatccctggtgccttccgcctttcgctgcagcctggactaaccacgctttgagcaagtgaaacgcttgccactgttgctgtacttctgagtcactgagatgagacagtgaccagtaacaagactccctccttgattaaatgaaatcaggttcctctaagtcctcaaggtctcgatcttacaagtccatccttgccagacccgttatcacctagttttagcaaaaatcttgttacatcacttgagaaagaatccccacgctggttatctcaccaaattcatcatctctcaccattccccaggtgagatctgatcaccctggcctgccttcagcacgactcctgttaggtctgtttagcaagaatcttccttacttctgatgctcccttttaggggctatctacccactgacccctaaccctgccttttggctacatatccccacttgttcaagtatgttcagaattgggcccctactgcaatagttcctgactaaaatctgtttttactactctaatcactctctggttttggtttttctttcttttcttttcttttctcttttcttttactttttttgttgttgttgagatgaggtctcgctatattgtccaggctggtcttgaacaactgagttcaagcaatccttctgccgcagcctcctgagtggctgagattacaggtgtgtttttctttgacaccagcagagtaaataccccttggaatatttccctccatgctggtcctgttggtgttgtgtatgaggctggtgtttgggcagcaagggagttgattacagcagaaggttcctaatcccacctctacttcacaacgctgttataatgaacagaatcagtccaaagagaaaacaatgaaaacgacagtcttacttgtacctatattcctagtatcacttgatcccccaacaccacccccatcagctccctgcctttaattcctctttaagtaacccgggagagatacgtccctttggggactgaatttaaagtgactatgaattagttatgccacatccttccaaccacaaccaggccctgtttaaaagcagagaatggacagtgtaagtgcctcttcccaagacagccacctctgccacttgtagttagagaggctgcgactgatctggactgcggcaaattaaatgtgttataggcaacacactctaaataaggccgcctcccttctcgcaatgtccagtttagtcctggcacctcatttgaggaggtgagggacagcaagaggaaatgacaggaagtgataaaggagctaaaaatagatgtggaaatgtgtagatatgagagtttcactgaatataaataggctgattagattaagcatcaactggcaaatacaatgtctataagcttctgggtttgctgtatcaaattgtcacaacctctgatgggtgaactaataatccactgtcaattcgatcatgatgtcatcttagatgacatgatcaaaatggtcgtgaaccagggaaggctgtgaagttacagtgagtgatttgataacatctggcttgcttgggctcggctctaatagggtctctgtggggtttacctctgatttggtaaaagcattctacaatccaaaaatatcaagcgttgtctacggacataaaccagtcatgaccataggagttataaacgggtttcaatgttttagttgacaaatgctgcaataactgctacactttattgggcacctgttctggccaggcattaggctaggacagaaagaatgaagacaatttgacaggcatggtcaatgcaattatattataaaacatagcagggccagcagagtccactcacagccagaaccctaagtagtttcaagcactcaaaaatcaaacagaaaacaacttcacgcaagactgaagggaagtcattaagacccatccaggtctgagtgttatacgaaaatgttactgtcgttaattaccttccaataataatgccaattacagaaaataatgagaatgtttacccaccaaactaatagggactggcatttcaaagtctaccagaataacctaggcaacaagaaatgttctgattctcccatgtctggatgtttttgctttttcttcctttcctgctgacccacttcaaaggtttcatgctggaaacactaatcatgtcctcctttgctggagtaagttaccctcctttttgctccctgcctagtgcctccgttcgcatccaaagtaacgctcattacctgcaaactcaaacttccagcagcccacatgcagatcccagcacacagatatatcattccacattggcctacctgatttacagatcacatgggtttctgaaatacagataaacgggcacttggggaaagcagtaatgttgtaaaacgtagagaaggtcatgcatgtatattttacctggaacctcacaagaattgataacatttgtgggatttcatttctacctacacagaaaacacatattctaagggtttaaacttgaaaactcacattcaggcacacatgcttatgcctgtctatggatgtgtgtgcatgtgtgcacatgcatgcacaaatcaagaagagtttctatttaaagacaacttgcaccaaaaaaatccagattactttacaatgcaaatcatcatcttttgtattttattacgagcttcctttagtatattaatttctaagcatctttaacacaaatcatcatatacatacaactctctctttcagattcagagaaggagttaaaaatcagccaaaaaagaaagcaaaaaacaatgaagataagggaggagggagtgtatatggagcaaaaggaggaagccagctggttagctggccttttaaaaggtatcagggaattaggcccaaggccattaatcctacagttttcactcctctgccaactctcacggcttacattaccgagccatcatccagattaaaaatgggtttccataagggtttctgcttccccaggaaccctcctctctaccctccccacctgctgccccttcacacagcagcaaagtgaaatccaaaagaaaaatattaaaatcaaacaaggctttagggatttggggaggtggatggagaacaggttcttatctaggctttagcacaatattccttcttcaaagtcttcttaattacattgagagaaagaacaagcgacaaacagaagagctgccttctaaattcagtgcccctcaatgaagggttcaggttcacaggttctagccctaagggagaatgatgatctgtgctcagcttcttgccacccagggtcccagccccccagcctctgcctccatgtttcccttcacccccacttgctcagcttcctccctgctctaagaagtgcccctacttgacagctattctgtccatggaatttccctgctgggcacctacattttatttttcaagtggaaagaatgcaaggttaaggactgtgtttctaagatcccaaagctgcagccagttaagaactgaataattcaaccagaactagttgttctgtccatactagctgcatgtggctttatcccctgtaacctagagcttgtagaaatgagaaaattaaaccatatccagcagggcacagagcgtgcacattgtccttccgagtagattcaaaaggagctggtagtcatgcatcagatggtgtggcagtcttactgttaagggacaagctaagggctgactgctctcccccacgagtggaagtgccaaagtgggtttatctttactgcaggtctcctgtgtgctggaatctgtgctaggcactgttcctgctttatttcaatgaacacttgtagcaatctgaaaggtcatattggctaaggacttgagctctggatctaaagcaggccttgttttcaatctcagattcagcactttccaagagtgtctttgtagcccattgccgggcttcttttctctttttttttttttttttttttgagacagagtctcgctctgtcgaccaggctggagtccaacggcccgatctcggttcacttcaacctctgcctcctgggttcaagcaattctcccgcctcagccttccgagtagctgggattacaggcgcgtacaaccacgcccagctaatttttgtatttttagtagagatgaggtttcgaggtttcaccatgttgcccaggctggttttgaactcctgggctcaagcgatctgccctcctcagcctcccaaaacggtcggattataggcgtgaaccaccgcacccagccgcctggaatttttaagcctcaagtttgttccactttgaatgcaagaagccacctcataggtaagaatattattgaacataaggcatggcacaaaatactttctaagtgattattgtccttgttatacccactttatagataaaagataaagtcatttgtccagaaggcaaagccaggagtggctacttaatttttcttgaccccaaagtgtatactctttccataacttcctgttgtctcccatggacccacctcaaaatcagaggtgtcacagtggtggtttaacaaccaaagtttcaaattagccatatacattctgggggcttccaagatcccatactggggtctccacccttatttccttgctctcagaagtaatgtgtgatgaacctgttctttggaggaagtaccttcctgtgggctggctggcacactgtcccaggcaaggccagcctggggatgttctagatgttcactcttttttctagtttcaatcctgcaaactcagtggacagaaggagctagggacttgaaagcatgaaagcattggattagaaagaaaactacaaatgcagtctgtgtaacagaatcatggtattttcatattgagaaggctctttttgattcagccattgtttagttagacctgtacaagttgaattcgaacttattttcccactgttacttttctaggtttggtaaaatgtgtgaatggctgtggatcccatgaaggtttttaagttagagcacaaaacgtcctaaaaagcacgtgactggccttgccaggcagagcaggatgtaaggaaaaaaaaacagaaactcagggaaatgcaagcatagattccaattctatttgttatcttgcagcaatgtatttatggtagatggtttccacattacctactaaacccagacggcaggaaaaaaaaaaaaatgaatgaacacagctcttccaagctaagaatatgactccaatcaggtcagtaaatagtcaggaaactacggttttatcaattcctgatttgttttgattcaaaacactgacccccaaatgcttcctttttttaccctctaaatctgaagctggtgaaaaatgaagtgattgataataaagctttcactacttccaaaagaaaaaaataaatgaaagcaatttgaataaagggccatttactctcctattctttgaatacatttattctatactgataagcacacatttacgctagagagaagatggtcttcagaataagcacttactaggattaaatttacattatctgtctaaatgcacacacattttagactggcagtagtatatgttgtgctcacattttgcaaacactggaaaggtgagtttttaaaaatacagttttacaactctagaagttgggagaaatataatttcctaatactagctataggaggaaaacagaaaagtgacctattttaatgacaaagcattcataatatatcttccccgtacttaagaaccagcttcatctcagcccatcaccagaaaggagagaaatctcgtgtataaataattaggcaatctcaaaatgagtctgcagatgctctgagataagcctgctgacaaagtcacaatgacagcttgctaacgtgttcacaggacatcagcttctcttaaaagctgctttcggaacgatcagctgggttcctactgagttaaaacacaagcattcggaggcagcttgtgttcaacagctacataaatctattaatccaactagaggggtgggggaaactgaagattacatctcaaaggccctcaaggcctgtgtttcaaggagtagcaagataaatgcaaccaatataaaataaagcttatcagttgttggtgttttagatgatgctacctttcagggctggggagtcaggaaagtacatgtctgagaaaaatgaccatatgtggcaacttgagcactgtttgccactgggcatcaaaatatcttaccgtgtgctcataagagtggatctaaactcaaactgtagttacatgagcaaaagagccccctgatgagctggtgaagttctccgttcaactacagcaaaatggactgagctcccatcacatgccaggtgttggtctaagagacggatttgccgaggtgactacacggaggtccctgccttccaggggcatgtgtcatggtgggaaatccaatgagaaaacagttcgcttccacacaatgtggtgggtacttaaagagaagtgttctgtgggagcccagagcagaaaagtcctgcctagaggtcaggaaagatgaccagaaatgacgcctgagctgactgatggtctggaagcacccagcgaagaagagcaatgatgtttgctaaggcaacgtcggtactgtttctccccaaaggcatgggattttatacacaccacctgcttttcatatagaaaactcatgaggaagctcctcacattgtttttaacagcaagttcaaaacaatcttattatatgattattgtctgccagagaacacctgggcatgaatgcttcctgagttcattccaattcatgactaagaacggtgggatacagcacagagccttagggctgatgccatgaaataaattcattgttggaggctgctgaccaccccaagtctaattctggggtaggtctccattctaccctgcaatcactcccctcactgacaaacgggctaagctgctatatttgccaagttgcagctaccaaagtaagtaaattcaatccttgggcttggagtcagcagaggcatggggccagccagagacccagcttccatagcacaggctgctgttcctaagccctctgctctcacaagcctgggtgccacacattcagcaataggaaatttgatggctcctgggactaagggtaaaaaaaggctgaagaaaagggaaaattaattttagcaaactagtagctaccatttattggtacttcttgatgctaagtgttttacattcttttcctcaagtaatcttggcacatctagggttcaagcactaagagcattctccaattcctaccaaggcagatacttgggtaaaccctgtacaaagtctcagtcttacatgaagcagagaggactcagtaaaaagttccagtaaagccagctttctggtctgcaagaaatgagatctagagtatcaaatccatcgttttccagggaccagagcactctttagaatacagtcatgagtcacttaacaatggggttacgttctaagaagtgcggtattaggagattttgctgttgagtgaatatcatagagtgtactcacgcagacctggatggtataaccttctacacacctagaatatatggtgtagcctgtatctcctagactacaaatctgtatatcacattactatgggcagttgtaacaccatggtaagtatttgtgtatcaacacatatctaaacatacaataggtacagtaaaaataggatataaaacataaaaaatggtacacctctgtgggccacttaaaatgaatagagcttgcaagactgggcactgctctgggtgagtgagtgctgagtaaacgcaaaggcctagggcatgactgtacactgttatagactttataaacactgtacactcaggctacactacatttattttaaatttttttcttttttcaataataacttagcttactgtaagttttttaccttagaaactttttaactttttgactcttttgtaataacacttagcttaaaacacaaacatattgtatatagctttacaaaaatattttctttcctttttcctttttttgttttgagacaggatgtcactctgtctcctaggctggagtgcagtagcacagtaacaactcactgcagcctcgacctcccaggctcaggtgatcctcctacctcagcctcccagggagcttggactacaggtatgcaccaccacacctggctaattttttgcatttttgatacagattaggtttcgccatgttattcaggctggtctcaaactcctgggctcaagcaatccacctgctttggcctctcaaagtgctgggattataggtgtgagccactgcgcccagcctataaacttttttctattttttttttttttacttgttcaacttttttgttaaaagccaaaacacaaacacacacattagcctagagcctacacagggtcagaatcatcagtatctctgtcttccatctccacatcttgtctcactggaaggtctctagggacaataacacgcatggagctgtcatctcctatgacaacaatgccttcttctgaaatatctcctgaaggacctgtctgaggctgttttacaggtaacttaaaaaaaaataagtagaatgagtgcactctaaaaataacaataaaaaaactatagtatagtaaatacgtaaaccagtaacatggtcatttattgtcattagcaagtactatgtactgtacataattgtatgtgctatactttcataaaactggcaatacagtagatttgtttataccagcatcaccacaaatgcgtgagtaatgcattgtgccaagacagtataacaggtatgatgccactagctaataggaatttctcagttccattaagatcttataagcccagcatcttctatgacgtcattgttgacttggccatgcattgttataattagctcacaccagcacttttatggcttcccaggcaaacaaaataaatggcaaaacatattaggaaaacaatataatgacctgctacaacctccagtaaccctgtgcaaagaggaaagaggatccaagggtgaaaaactaacatattaggcatcttcttccattcatttttttcactttctcctctatgcctgccaaggaaaaactcagattcttgatttaacacacattatcttcaaatagaatccttatcgttgtcagacaatgagaggaatgttgcaaatacatccaacaatctgggtataaggaatttctttctttagctccttagatgttcttgattttcccatcaaatctctaaccttacaaagaaaagttgttttctttttattccacggacaggcatgattctgagaattctgcgtgttactaccaagctccacaacctacactgtcataaatcattcattcactccatctgtatttatgaagctcttaatatggacacaacattgtttttgtttagatctgtgcccagcacaagggaagcatgagaccatgcatctggtctttctggtacttcctcatttgaggagcattttattatatccagctatatttgaaggttcaaactaagaagacgaaatagcaagttgctaaggtaaaacccccaatgcctttgaagattttaaggaaaagaacagggagagaggaggagtgttacttgactctaatgccagtttagctccatggattgcccagacatttgcagaacacaactctttggtgagccaaaacacccaggtaaatgaagggagaaaagaaaatactctcattttccacttaaaaactctatgtttattgttaatgtattagaacattgtataagtttcccaaagtggcagatcacccctgagttagaatcaactcttaaaataaaacacacgtacatttaaagatttatcatggattcaactaaacatgaattaatatggcattccagaaaggagtcagacagtattaaaaattattttcagtctccaatgattaaactcccattttcctcctttttcttcagtcttgcttgcccagagaaattagtcctacaacaacttgccacagacagtctttatcaaaatatcaaattaaatggcgcctctaatcaggaatgtacggacaggctcaataccaacatgttagtgttactgggtttgaaaaaacatgagaaataactaaaaataatgaatcaggccttcagccaaaaaatccgaactataaaggatgttctaatggcagaagctgggaacagtcaaattcttagatgcacttctcttgaacttcatttgtgccaattctcagagaatttgtaaagtatttcttaggaacacgcgttactcaagagacagtaactgacctgaagttcttaaaatttgttctttaattaactagaacataaagaatgtgtcttatcttcaggaacttctggttctgctaagaaaatcagttgcaacagcttcaagctaacagtgatactaaacatggctgcaaagaccagctcttaaggataactggaaacgtgagaataacttctcaaatatgaaactttgtcctatttccaggactacaattatctggaatccaatttctttttctaaaaaagaaagggaaataaaaagcagttcctataacaaacctgatgtgcctatgtccttcttagtttagttttatttttaagcatgcaaacttatgtttaacaaagaatgaaggtaaacgcaggcagctatggtgtattttaaggaaaaatggatgagtataaggaagtctaccatttactagattgtatattactttaggtaagtcactttaaggcataaacatacctattgctttatgtgtaaaatgagaatatttgtgaagattgaaatgggtatgttctttaaaatatcataggagccggtactttgtagttatatatgataaatgctaggatgtgacttaatatagaattaaattgacactcatgattcatgtcactcttacatttaccctcttataactcaagtgattcccagaagaggggtacacctcagggtactacctgccccccaacaccaggtggcttcatgaaaattcttgggactaaattatattatcaagaagtccaagagaatgctttagctggaaaaagtggggtggtggggagaaggttggggagagggaagtaggagagagagagaaagaaggacagagaaattggaaaaaaaaaagtgtgaagaaaaaaaaaattaccctgtggttagtttctactcactttaagaaagtgaaggatttactctaggaagtggtaacaaagggtgtgctcactttgtgaaaactggtcaagctggacatttaagatgtgtgaactttttttggatatatattatgcctcaattaaaaaagctgactttaaatgtgtctttcaaaaaagaactaaaagaacattccatttctagctctgagcaaagaaaaaaattaaatcaaaaagacctataaatataccacttgatcaaagtgtacttataggaactctggtgaaaagaagccagaattccaagtgggagagacctagattcaaatctagctctgttggctgaccgtgggcaagctgacattcctgagccttggtttttctcttctgtataatggagtaaagagtaacttccttcaagaggcacgtaggtaccaacaagtattattcccttccccattcctactctgctctgaaaaatcatcaaggtcagagtccacaccaagtcctgttgttttaatatggtgcctggcacatggggggcagcttgataaaactttgtagaagggggaggcggaggttgcagtgacctgaaatcgtaccactgcactccagcctggtgacagagcgagactgtctcaaaaaaaccaaaacaggccaggcgtggtggctcacgcctgtaatcccagcactttgggaggccgaggcgggtggatcacgaggtcaggagatcgagatcatcctggctaacacggtgaaagcccgtctgtactaaaaacacaaaaaattagccgggcgtggtggcgggcgcctgcagtcccagctactcgggaggctgaggcaggacaatggcgtgaacccgggaggcggagcttgcagtgagccgagatcgcgccactgcagtccaacctgggagaagagcgagactccgtctcaaaaaaacaaaacaaaaaacactttgtggaatgaaagaccagatttttaccttctagggacctataatctcgaacggagtcagaagaaaaagaccatgaaaaaaatccatcacttccaagcccctccgcttgctgatggctcccatttctcccaatcacaaataatctctcccaacaggctgtggtactgagatttctttaaaaaggctacacttcctgctatttgcttttgcttacataaaaccaactctgcttcctcattctttagtatccctgatttgcatgactcttggcttggtattctatccctcgtatttcttacagcagttgtttgaccattcctcaccattcaaggtcttatttcacttaacactttaactttgaacatgtgttactttcacagcatctctcacaaggcaaatgctcaaatttaattttgattgatttaattcttggaacacaagttcggaacccatctaaatactagcttatgttaagtctctacccaactagtttcatgtaaggagaatatacaaaccaggaatagcaataatgataataagactgatgcctgtgacagactaaagtaatagatttatttcccattcaatttaggaacccttagaattcttctaacacagcagtccaggaagccactaccaatcaatctaagttgccatcagttgaaatctattagtcattcccaggaataaatatcctccagtatgacagctctccaacaccttatgacctcagaaaatgtatcccaaatctgtcttaacacatgcaatgtttcctacgaaattccttaaagcacagaattcataccctgtatcttaaacttctaacacacaactagtatactcaaaaccgaaagatgatgtacatcatgaacacttgaaaaattcacgaattaaaaatgtcttacagggaaagcagttgtctccttgggaaagaatggtgtatggtttacacctattttaaggagaatgatggtggcatgagcaggtgtcagatctcagagcagaaggcagaggtcttgtcatacaggtcttactccaccccacaaaccccatccaatattgcttgactaatttggaatggctattactcaacatttggagaatcagaattccaagcagagaaagcaaacaagaaaaaaggaacagtttgctgtagcatatctccctcaccccacgaaattaagatggcccaaaccatggctgaccatgcacattcacttacatacagccctgacttctctataaaggatgtagctttcctcaaggtatcccttcttccttttctccatcccccaaacaattctcagatcaaacaacaaagctgcctctgcaaagtctactaatatcctgattattctccaaacataaaaaggtgaaaatgaattgttagtcttttaataacgaatgcaatcagtccatctaagagtttagcaattttccctaacaacatacttctctccaccctcacccttacttttctgagctttcaaacactgtgaaacatttgctctaggtacctagcatcagagccttgcacaaagggttggagagaacaatcgacaaagcctctatctgtttcatcatgatggttccccttactaataggaagtgtgcttcctgtccatcctttgacttttgctgtcagtgggaaccctattgccttaaaataacattctgaattcacctgcttactgttgagcacgctaacactttcagtagtgacacttaaaaatggaaagttccattaattgttaataatggaaaatgagatactctgaattaggaatatgctctcactttgctgtttattatagctatcagttctgccatattatatatgaattcataaattatgctgtgagatttactctcataccacattgaacttggtaagaatctattctaggtcttcctgattaaattcacatttaaaaaaaaaattaatgggtaagtatttatccactattaggaaactctcactttttgaagcgatctataaagtctagtaatcagcctgtgagcaagttcaggtatttataagcctataaaatacacctgccacatgtgggtttttacacttgaacagtaagatggcattggctctgcaatatttttgaaaaagccaaatacctacctcttcatcacttgtaaaattaaagggcaatcgtaaacatcggatacatttctatttcttaaataggatctaaagtttaaagaaacagctttctggctcattttagccaaacattaaagtttcactaatttaggtaacattcatttggtatccaaaaatgagcataaatactgtgtgctggaaaaaaactctttaagcaaacaaatgctatcagtaatacaggattaagggggatgatatatgttccctcaaaagaattatttcccaaaactgcatttacaaagaataaatgaaacttaaaactattctgtatctcttacaaatcagtctcttaaaaactcattttacaatagggtcagacaatgataaaaacttagaactgctggtcatggtgtctcatgcctgtaatcacagcactttgggaggctgaggcaggaagatcacctgaggtcaggagttcaagaccagcctgggcaacatggtgaaaccccacctctactaaaaatacaaaaattagctaggcatggtggtgtatgcctgtagtcccagctactcaggaggctgaggcaggagaatcacttgaactcgggaggcagaggttgcagtgagccaagatcgtgtcactgcactccagcccgggcaacagagcgagacaccatctcaaaacaaaaacaaaaacaaaaaaaaccaacaaaaaacaaaaacaaaacacacacacacaaaacaacttggaactagctgggtaaagaatatagtggcctaaggaaatcgttattagccccaatttataaacaattaaattgatgacagaaagaggagcaggtggcttcttgcattcaaagtggaacaaacttgaggcttaaaaattccaggcggctgggtgcggtggttcacgcctataatccgaccgttttgggaggctgaggagggcagatcgcttgagcccaggagttcaaaaccagcctgggcaacatggtgaaacctcgaaacctcatctctactaaaaatacaaaaattagctgggcgtggttgtacgcgcctgtaatcccagctactcggaaggctgaggcaggagaattgcttgaacccaggaggcagaggttgaagtgaaccgagatcgggccgttggactccagcctggtcgacagagcgagactctgtctcaaaaaaaaaagagaaaagctgctatagatgaataacttggtgtcatggctaaaaaagaacaataattgcaacctattctaaactaagagtaagacattgagaaatgccaaatcaggcccttcagttgcaattggaaatttaaaactatgtttttcatttacaagaaagaaaattcacttctagcatgttatctttatcatcatattaggccatattgtagatgagaacactggagtttaaagagatcaaatagtatgtaataaaaggagaaccaacatcttttaaaaactgtaaatgtatgtgatcctgtttgtggaccagcagagattatgctagtttgatttagtgaactgtgtgaataatgaataaattcaaaaaatatgtatttttttgttcccatgttttttatatttatttcaagtttacaatacaagcagatttaagctgagcaagggttccttgagaaggagggcccgacatggatctgaaagctggtgctattaatagtttgaaaagaaacaaaatcatagttggatggtacatgcatttgccatcatttattgtcatcattcattgccaccatttcccagttcatttcctggaaatcctgctgcagaaaaggttgtaaattaatttttttttatttttattttttagatggagtctcgctctgtcacccagatgggagtacaatggtgcaatctcagctcactgcaacctccgcctcccaggttcaagcgattctcctgcctcagcctcccaagtagctgggattactgttgtgcactgccatgcccagctaatttttgtatttttagtagagacggggtttcaccgtgttggccaaactggccttgaactcctgacttcaagtggtccacccgtgccggcctcccaaagcgttgggattacaggcataagccaccgcaccagcattaattcttttacaagctgtccaggatgggccctaatacactatccccatgataagcataacttgcattccatttcctctaataagggtgtctccacagtggattaaatgcctcagccagatgcacaatagactagtcatcattttcacaagctccagttaaaccacacgagtaagggcataggaggtcaaagggggctgctgatgatgaagaaaccgggctgccaggaggaaggcaaataagagcaagagtgttttccactagtaggtcaccttacagatactgacatatctgtctcctggctaggcactccttcctctccaccactccaggaaagatggtccacccggtgtgggatccaaccacagcttacagacacaacaaaaacttcctgtgagagcttgagactgccgaaaacacatctagttttgctttattcttgctacttggaactacagcctgggaacagatacactgaattactgcgacagccagagagaaaatcatgaaataggaggagggaggaagaagagtcaactgggaaaagggaaaggaaattaaatgaacagagaatcaattatatgtgagcctgtctctgcttcatatgttatacaatttaagcaccaagtgtcattgtcctcatttcacatatgagttgacggaagcttagaaaagcctagcaacaggaccaaatgctttgactctactttgcaaactctttccacataatcatggcaggatccgcatgatcctgaactggagaaacaatatagtcaactaatgctctgtatgtgtctcagaaatagctttgctgctgggtgccactggtacatgcaatgtaaccacagacaggccaatgaggcctaaatctgttagatgtcaggctgcagagatggatgatgccagaaggatcaaggtgaagggcgtgaactctagagtcgagctgtccaaggctgatttctgactgcaagactcactggcaaagtgaccctgacaataacacgtgctctccaaccttcagcatcctcagctgtaaatggactaacagcacttgcctcaggtgccagtgggtgtttagcccagtgcctggcacacggcaagttctttagtgttattaagttctttgataattaaatttccccagttgtgtaattaagccaatggcaggaaaagatcataaatacagataagctccaaataaaccttggcacaagaaaaggcctcctgtctcctggtatgctgtagggtggcaggaagcatgttactctaaccatcacaaaaaagcagaggctctgataagtgattactccaaccgcaataacccaagagatgaaactccctcattctgaatggccagttccgattccctatccaatgagcaactgagtctaaatcccatcaatgaagcctacaaaagggacaaaagtcagcaaccaacatcacagcccactcaagctcagagagctgccctgctcaccaagagaaggcaagtcaagagctaagggcaaatggggaaccctttgagactggcctcagaaagaaggccaacggtggacctaaatttcacatttctcaaacacttattctgcgagcttgtaaaaagcagtctcttcaacacctgggtcttctgagctcagcaaaaagtgccaggttcgaggatacccagaattctccctcatctttcactttgaactgagctggcctgctgcaaatattgtttcaatatcacatcatgacactttattctagtacttagcttgatgccttctgcagagcaagcactcagtaaatatttgttgattacaccaacagaattattttatttttaaaaaacactgacacaatctgcaatatgaatcttctttctcacgggagctatgtttagttatttttaggatatccctgcagaaatgcacaaaaagagggagaaaagaagaaaaagaggaaaaggaagaagagtagaagagagagagaggataagagagctaatttttaggcacctgaagaagaagaagaaaaaaagactattgaagacaaggtgttagaaatgaggcacgatggctctgagatcaaaaatggcaccatattgcaagagggagagagagacccaaattaacatcctttccttgcaaatggttctgtcctatagcagagtatactaaagaatactgcttagaagtcctaacagagctagatcttgccatcattagagattgcctcaacaattttcaagccctgagatttaccctttacaattttctattttaggacctaaggggcaggtaggagaactttcactttttactttatcccttttcttattcctttatttatttattacaatgggtaggtaccaatttagtatttaaaaactaattatctcccttcagaactagaagagatcttgaaaataattaatttcagtggtcttctttgttggagagaaaaccatgggcttacaagagatcaagctgagtctgggatgcaggcttcctaacttgggggccagtgttcattcagcttcctggatcacatcaacagtctcagagcactgggtggcagaggccaaggaggagcgacaaagtgtgatgagtttattctggctagagtggatcctgatcccctaatagtgaatcatctacaattttacaacatgaccaccagaaagcatatacatataatgtcccaaagtcaagagcaatctgaagaaaaatttcttcccacaatttatgaattatttctcataacagtagggaggctatgctggaaaccatgagctaggttccaggtaattggtgcataagaactaaataagacaaggataaatttatgtgatagagctaacaatgggacaactgagcatttcttaaaatgtggccgcgcacagtggctcatgcctataatcccagcactttgggaggctgagacaggtggatcactgaaggtcaggagttcgagaccagcctggacaacatgttaaaaccctgtctctaataaaaatacaaaaattagctgggtggtcgcgtgtacctgtaatttcagctacttggaaggctgaggcaggagaatcgcttgaacccgggaggtggaggttgcagtgagcaaagactgcaccactacccccaagcctgggtgacagaaagagactccattttttttaaaaggtgtcagacagtccaagagaacacaatgcatgccagggttctggttcccctagcttccctgtccccttcgctagaaattaacatcaaaccacagaaaatgcctcagtaactacttcttcagctcatctccagtctaggggccccagtatatagtggcagttcagggtatctccttctgtttttcagacacttcaactgttccaaagacctgggcaaaatctcccttttttaaaccatgtggagaatcttctttcctattgtcattagttaagtataaaatcaaaagcagagactctctttaaccagtacagcctcttttccagagaatgccaaggagacgctaacccagtttggtcctgagctggtttccatctccatgattcatgccataaatgtcatcctcagcaaagagaggatctggtggcctgctactctcagcttcttactctgggagggaagtaggaagtggtaaggataattccttggatttacttcatcaatgactctataataagtaataagggtagaacacattacaattcacaaaataattccacaaacattatctcacttgcttttaataacaacattggaagaatgaacaactcattccagtgaggaatttaagactcagaggttaaataaagctgaatatgggaaagattaggcaatttgcccacctcaggacttgaactttggtgggcaggctttagctctaaagttcttctataccaaagctgtgtcaacattaaagctgggactggacttccaatctgaggacccagaagagtcagcatatcctacttaacttctaagggtagggtggcggggtatgatttctttattttgaactataatttatatggtgtctcctagaagtttatggcccatacaggtatcttccactgttgcgggaagtcaaggaccccgaacagagggaccggctggagcctcggcagaggaacataaattgtgaagatttcattttaatatggacatttatcagttcccaaataatacttttataatttcttacacttgtcttactttaatctcttaatcctgttatcttcgtaagctgaggatgtacgtcaggaccactgtgataattgtgttaacggtataaattgattgtaaaacgtgtgtttgaacaatatgaaattagtacaccttgaaaaagaacagaataacagtgatttttagggaacaagggaagacaaccataaggtctgactgcctgcggggttgggcaaaaagagccatatttttctctttgcagagagcctataaatggacgtgcgagtaggaaagatatcactgaattctcttcctagcaaggaatattaatattaatgccctgggaaaggaatgcattcctagggggaggtctataaacggccgctctgggaatgtctatcttatgcggttgagataagaactgagatatgccctggtctctggcagtaccctcagacttactagggtggggaaaaactctgccctgataaatttgtggtcagaccggttctctactctcgaaccctgttttctgttgtttaagatgtttatcaagacaatacgtgcaccgctgaacatagacccttatcagtagttctgcttttaccctttgccttgtgctcagtagttctgcttttgccctttgtcctgttccctcagaagcatgtgatctttattagatccttattagtagttctgctttttgccctttgaagcatgtgatctttgtacctactccctgttcttacaccctctccccttttgaaacccttaatgaaaaacttgctggtttgaggctcaggtgggcatcacggtcctaccaatatgtgatgtcacccccagcagcccagctgtaaaattcctctctttgtactctttctctttatttctcagccggccaacacttttggaagatagaaagaatctacattgaaatattgggggcgggttcccctgatattccactaagaaactatttcaatatggttttattatgctgactaattattacaagttgatcagtcttcttctgctgatattgtttgagtggaataattctgcatagaatgttcaaatttttgttttttgcttaatagatataaccatatatatatatatatatacctgaataggcattcatttagatctccctcattcttctaaaatcctgcctaatattctaccaaatggatgtaccacaatgcttttaatcaatctcctactgatagaaatttaagttatttcaaatttttcattcttataaaaaaatcaaaatatttatttcaacaaccaaataacaaacaatatatcaaatcactatttgaggtcaggcacggtggcttatgcctgtaatcccagcactttgggagaccaaggcagacagatcacctgaggtgaggagttcgagaccagcctaaccaacatggcaaaaccctgtctctgctaaaaatacagaaagttagccgggcatggtggcgcatgcctgtggtcccagctactcaggaggctgaggcacgagactctcttaaacccaagaggcggaggttacagtgagccaagatcatgccactgcattccagcgtgggtgacagagcgagactctgtctcaaacaaaacaaaacaaaacaaaacaaaacaaaacaaaacaaaagtcactctttgtgataaagtctgaaatattctgttttggctgaatgtaaaaacttaaaactataaagcagaggtgctgtgggctctgtcaaagtcagttttatcacaggaaaccgttgtcttttgtggatttctttgatagaaactgctttttttggcatttcacttcttttatagaaaaaatgctattctgttgggactgaatgatactatatcttgacacagaaaagttatttatacataaattacagtaactttacccatgttaatgaagctgtcatcctcttgtgtgatttactgcaatcttgtaatagaaaagtttcatttccttgacacctgggtggtaatgggaccgataattccatgctgcaaatgtttcctcctctcttctaccagaggtgtgttaaaatctagagtgcatttttaggtcagagtaattctgataccagtctccagggcccagagcaccagcgcagacacacacaggtgtgcgcacccacacagtcacatccattatccagaaaacccagcaagacctcctctttcttcaagagatttatagttctcaggatataggcctgtacttgttctgcaactgagtttgagaatagcaacatatacgtaatgagaaagaataatagaaggcattaaaaaatgactgggaattaaagttggaaaaggcagtttaacagagagttcagatttcagtttaaagtttaacaatactgtttaaggatgggtgcagtgactcacacctgtaatcccagcactttgggacaccaaggcaggaggatcacttgaggtgaggagtttgagactagtctggccaacatggtgaaaccccgtctctactaaaaatagaaaaattagctgggtgtggtggcctgtaatcccagctactcgggagactgaggcacgagaatcacttgaatccagaaggcagaggttgccttaagccaagatagcaccactgcactccagcctgggggatagagtgagactctgtctcaaaaagtaataataataaaataaaaaataaagtttaacaataccgtttaagaaaaagctacttcagaaggtaatagataagaagaaacatataggtaattgaagacagcctatcacaatcaatttttctctctagatcttaccaaaattgtaatatcagtaataatactgatagaaagaaaattaaaggagatgagaaaaaggattttcataagctaccacaatgtaaagatcttttcataaatagcttcttacaactacagactttttaaaaaaccttcatcctggctgggcgctgtggctcacacctgtaatcttggcactctgggaggccgaggcgggcggatcatttgaggtcagaagttagagactagcttggcggacatggcttaatcccgtctctaccaaaaatagccaggcgtagtggtgcgtgcctgtaatcccagctacttgggaggctgaggcaagagaatcacttgaacccaggaggtggaggttgcagtgagctgagattgtgccactgcactccagcctggacgacagagtgagacgccatctcaaaaaataaaaataaaaaaccttcatcctaacacatcctaacacgtctgctcctttaatattttcattgataatatgctttcgtaaaattctcaccagcatttttgaggtgcaatattcatttagctaagcgaatggtttcacctcaaagatgcaaagttctggctggacctagtatgatcagcacactcacactttctgatgtgcgtatggtaccactgccttttctgtctgtcagtagaatggtctccactgtagagaagacagaacagcagatgaaggtgtgcctggacaagcaaccacaggttccatcccagaggtagctggtgggtggcgctgttagtccacaggacctatattccttttctgcttgtcactcattcaggcactgctgaccaccactcactaacctggcattcactgaatgcctaacatgtgccttgggtggtatgtgttacgttccagaaatacacagacaaccaaaacttggtcagcacactgttaggcacctgacagcaaggatcctgacataatgaacactaatgtggggagtcctgtgccttttccagggataagcctccatttagcacagctatctgccaaatgacttccttgctgagcttcaaagcctcccgtaatgcagctttaaacagcacgagatgctgtaacaaaagagacgtcactacactgaatgtgaagttggtatttcctatttcccagcaatgttacttcataggatttctattacattcaactttctagaatttcactgcatgttctttcactcaacaatagtgagcttctgcgctgcacccaacacagtgccaggtcctgtgagtatcattaggaatattatagattctgccccaaaggagctccacagatcacctttagttggaaataaggctcaatgtagacagtaacaaccatgctgcacagatatcatgaatgtgctagtctcccaagatggcctcatcaattcctcccttccctgattgcatttgctgcttcttccttccagaagtaagtctatttcccctcctcttgaatctaggctggctttgtgttttgctctgaccagcagaatgctgcagaggtgacactgtgtctgttttaagtgtggcccataagtggcctgaaacttctgcttttgctctttaggaatctgcctcttgggacccagctgccacactgtaaggaagtccagagcgggcgtgagaggctgcatggaggcgaactgagcgtcccactgagctaccagccgaatgcagccacaggagtgaccccagcagatgccacatggaatggaaaaacaaccaacccagtcaaggcactggatctcgaggaactataaaagttgttttaaggcactattttgcagatgtcttattacatatgagaatatccactgacatgatgtgttagtcacactgttggaggagaatatgagaaatatccatggatcagttcccctaagtgaaccctctaatattcctgaggcaaaaaaaaaatctactgttagcagaattcaatacagcttacctctccaaaaatctactgttagcagaattcaatacagcttacctctcctgtggagacctttgttttagcctcacacatccttggagaaaaaaagaattcaactttacagaaaaatagcaaaataggagaactcttcttaactttcatgctcattaaagtgaaaattaattaagaagacatctgaggtgtttttttttttggagacaaggtgtcattttgtcacccaggctggagtggtggtgtgatcacatcccactgtagcctcgaactcctgggctcaagtgatcctcccacctcagcctccagaacagctggcactacaggcattacaccaccacaccaggctatttttgttgttgtttttggtagagatggggtctccctgtgttgcccaggctggtctcaaactcccaggctcaagcagtcctcccaccttgacctcccaaaatgcaggaattacagccatgagccaccacgcttggccaacatctgagttaaaacttttttttttttttttgagacaaggttttgctcagttgctgaggatggagtgcagtggtgcaaacacggctaactgcagcttcaaactcctgggctcaagcaatcatcccgcctcaccctcccaagtagctaggaccacaggcacgtgctactatatttggctaatttttaaaatttctgtagagatgggatcttgccatgttgtccaagctggtcttaactcctgggttcaagtgatccttccacttcagcctcccaaagtgctgcaattaaagccatgagctaccacacctgaccaagagctaaccattaaataaatattcctggtttaaattccaaattatatgaaatgaatcaactatattttatttagaaggtcagataatacattacaaacagtgaatgtagattttatgtatttactatgtgttaagaagaattttaaatcctgatttctttttctcgggtttaactggaagcaagagcacgccacatcatgttgatagttgatatggtggagctgatgagaaggaacaggggtttgaggttaaagagagaacaaagagagaggcaacagaaatgggaaaattcaatttttattttattttatttttttgagacagagtctcaatctgtcacccaggctggaatgcagtgacgcgatctcggctcactgcaacctccacctcccaggttcaggcgattctcttgcctcagcctcccgagtagctgggattacaggtatatggcaccacaccagctgatttttgtatttttagtagagacggggtttcaccatattggccaggctggtctcgaactcctgaactcaggtgatccacccgcctcggcctccaagtgctgggattacgggcatgagccaccgcacctggcccaatttttaaattttttaacagtatctgtagtgtgacttcaacagtaaaatcacttaccaataagtaaaacattcctaaatccctcctgtgttctttccctgcattatctcctaagcacgggcaacattttcatttaacaaagcaaacaccacagaaaataatcatcatgcaaactctcctgggaaggaagagggactgctgctttcttactagttattgcaatcagtgtttacagcatgcctttacacgaccaatacgccttacagtcgctcattagttactctttccaaattcctggagaagtgggtcagcattatcatcttcgggattactttagggaggaggaagctgaccatccctgtgaagataacttagccacaattgtgctgggtggaagttgaccacccctgtgaagataacttagccacaatcgtgctgggataacaggagtggctgcttcagaacagagccttgggtgccaccagtttgctcctccaacacatcatcaagcaggactccaccaccagcatggatttacaagactcccctcgtccctccctaaacatacaggatgtacatttggaacaagtttgtatcttcaaatttgtaaaatacaccatcacaggtcatcctttaatgttttgcatcgaaagggtggtttttatattcctttctctgtttcaaaaatgcattacagcttacaaagtaacatcctggtgaggctgcatttcctgagagtaatgactaataaaggctttgggcaaagcctcgcctgcaactcctctagccagcattattaacaacaagggcacagcttttcaagaggccccgctacttccatcataaatgctaacaggtgctccttttatctggggatcctcaagcaccttacagatactactcattaagtctcatgaggcctctaggagacagacccagtgagacacataaaagggaatcctgtcactcatcaaagacagaaaacagcaaccagctcatatacttgatagagcaacaacaattttactgaaggaaacattagaaacattgcctagaaatctctaacctagatgctttcttctgagtctcattcactcattggcaaaatgagaataataacactagttcagacaacttcatgaggttagagagtgcagatcaaatgaagggggcagagggaaaggggctgagtaaactctgatgtccatacagataaaaggcattatttccatgatctaaatcaaactgagatttgaggcagaaaatgccatctctaaatcttgtgcctaatacagggagtcttttttccaaacagcttgggcattatttatacaaatgcaaattctatttctatgtctatgatcacattcctatagggtataggagaagatgaaggaagagaaaagcaaaatgagagtcaaagcacatagacacaattatccttgattgtaatgtttgcatatattcaacattcaaaacattttttcatctgcctggaaaacattcatgatagaagaaatagaactgtacagactctgcaatggattatgtcgctttattcagatttgttttctttttttttttttaactccagttacaaaaattacagctttaaaagtttcactgaaattcccataaaactgcaggaattcaactgccaactggatttgctgctgcaggagataatccactttggttcagaggtggccccttttgcttgaaaggaaaccaggaccttcctgaaactgtcatgggctatctaaaccacaccagcccttagaactcacactcccaatttctaaattcccaagtgtctcccttcaaaaacgagaaagggggtacctccatgtatttaaagaggtcgattaattttatctcccgaggtctaagtaaacaaacaaacaaacaaacaaaaaccctggcaatttgctttaaaacatacagagtactttcccaaggagttgacaatgtggtgagaaacaatcagaagccagaactcaaaagaacagaggggcaagttgttgcgttactagagtaggttggtagccaagttttcgtttcatttagaaactttataaagaagtttccgtgaacatgaaagttatgacagtcatctgtcacagtcagtaaccgatccacctttcttaggattgaggaattctccattgtgagtgtctgagagaggcatggtttgtctctcattatagaaggagaacaagagagaagctggcttctctcttcccttgccttgttagggatataaatggaaactaaattagccaatcagatgcagcatttcaatgtccagccaaagcactgcccaacatccagtgtatctcggctgtctggacagggctcaggcagcagctccagcccagtcctaaccattatgtctatactgcgtaccgtccaatattccttaataacttctttttctggttgagttaaccagtttccattgctttctgcaaagagcccacactggactaatcatgggctaaagaggcaaccctttctaatgctagtactgcctggatcctgagcaattgtccatgggcagttcattttatagatataagaagcaggaggatgcaagaggaaagtgatttagcaaaagtcatttagcccaaaatttaaaactgccaggcacggtggcttgtgcctgtaatcccagcactttgggaggccgaggtgggtggatcacttgaggtcaggagttcgagaccagcctcgccaacatggtgaaaccccgtctttactaaaaatacaaaaattagctgggcgtggtggtgggtccctgtaatccccaggtagctggctgaggcagggaatcacttgaacctgggaggtggaggttgcagtgagctgagattgtaccactgcactccagcctgggcaacagagactctgtttcaaaaacacaaaaagaaggaaggaaaaaggacagtgagcagggggatgtgggtggctcgaggagactggaggaagaaaagggctttgaattctcagcatgtttacttgacttaaagaagcggctgggcacggtggctcacacctgtaatcccagcaatttgggaggccaaggcgggcagatcacgaggtcaggagatcgagaccatcctggctaacacggtgaaaccccatctctactaaaaaaaaaaaaaatacaaaaaattagccaggcatggtggcggttgcctgtagtcccagctactcgggaggctgaggcaggagaatggtgtgaacccgggaggtggagctggcagtaagccgagatcgtgccactgcactccagctggggtgacagggcgagactctgtctcaaaaaaaaaaaaaaagaagcaacacggagtataaagatgacccaactttccactcatccccaaagcgtgactggaataacactctctgaatcagcacttgctgcatggagcaccacattgagaacaattccaaagctgcatcttggctcagtgggaatgagttcaccaatcaattagtgttatgggtctagtaagagtgagaaggaaaacacagagacatgtattcaccatcgttgatatactgagaataactcccagactaagagttaaaataggtgtgttctggccttagctctgtctggctagtagactcttggattagaggaattcgtatcacgtgggagcatgctagaactggagaatttccttagatatactgaatcacaatctgcattttaagaaaataactgggtgattcatatggccaactctaaaactgcctgatttgggaaaattcccttctctgtccccactgtactagggaaatatttactgactgcccaccatatgtatggtgctgggccaggactattagaatatacaaggaattgatcaatctggtctagagttcacatacaattaagagatttactttatatgtcatcagctaccctccagagtagtactcaaggggttttatttttggctgctataaaagccaacgggaacaatgctaaatgaatgggaatccctttggattgcactgctaacaaaacctaaaagaaaatgatctgtttacacctttatgctacatctttccaaaccttctgagtacaaaagcaatcagcagttgcctgtaattactgtgtcatgtggatactactgacctcacattgttctccttggttacatcatcgtgcgacttcagagaaaaataattatcactacaggccaaaacaggtaaataggaaattcagaggaacagtgctttctacactacagcagacctggagggcagaaaagcaagaggaaggagacatctggtccagtatagtttggaaaggcataaaacctaaccaagttttataaagattaggcaaacgagcatcactttattccccatattggagtctgccagttcaaaaggaatcttatattctagatgagttattagtagtgtatataggcaaatgcctcttgaaatgtatacatgaatgatacaattttgatatgtaatgggctccctgtagaatgccccaaaccctgcaacctatttctctaacaacctaaaattcacaggtatgtgttctgttaagtttggttctaaaatgacttttattataaatttagtgacatgtttccatggagaaaaaaaattccaaaacatagaactgtaattttttaggtaaaaagaaaccacgataatgctatcccaatcccaatcccgcagattctaaagtgggtatctttaggctggaaatgggaatgcatttgaagtgctttcataaatatggtgtcactgtccctcacctggattatattctatggctttcctcatatgacaggaaaaggctctaagatctgtgacaacaggagctgtgtctctcttattcatctctcttttcacagcatttagtatggtctctggcacacacataattgttgaagaatgagtgaatcaatgcaaccacctcaaaaaaaaaaaacaaacctttacggttattacaggaggaaatttggcagcatatttcaaagataaagcagaagtacatggagaaaagtatcttgctctcaaaaagcctacagagaaagagtgctatcacctcacagcacttctaagccttttgcagttatggaagccatatgaccccaggtttatgagaacagatctgaagtagttttgacataaaaacaagaaattggccaggtgtggtggctcacacctgtaatcctagcaccttgggaagcaaaggtagggggatcacttgagcccaggaattcaagactagcctaagtaacacagggataccctgtctctacaaaaaaaaaaaaaaaaaagaaagaaagaaaaaaaaaaagaaaattagccatgtgtggtggcacacacctgtagtcccagctactctggaggctgaggtgggaggatcacttgagcccaggaggttgaggctgcggtgaaccaagattgtgccactgcactccagtctgggcaacagagagagaccttgtctcaaaaacaaatgaacaaacaaaaaaacaagaaattgttttcatccctcatatcctgcaatagccgtttcgcatgttatctcttttggcttctcaattttaaagttaaggaaaccaagacccaaagggttaagcaatttgcctctagtctaaaatcaagtccatagaagagaccgcacttggcctaagatctgctagccgctagcatggtgatgtgtatgccctgagaagaactgtgatcttcataaagaacataaagtctataatcaaagtaaaatcccaatgcaagtgtcatggggaactttgatattattctctagatcatttgagtcataaacttctttgcttctctatccttcctctcctcttgtattcaaaatattttagacagatgtattggccctgaaatggatctaagctgaccattgctttacagcctataatcctagggattaaaactcgagtgagttccttttaagacagaccaggtaaaaccccagagagggcctcttccatgtccatctaactgattgctcttcagataaatttctcccactttttaaaaaagccattttttctttcaggctgaatcactaatgcagggagtcatggctagaagtgggatgcagcggaggtgcccaagaactgaatccacaaaaagtcattaattgccaaaatgactgagcaaattcaaatgacccaaatgcattcgctcgtaagggcaatttgcttctaggaaactggaaggagagaggggtcactgaagccgaagccacatagcggatgacaaacaggataaggaaaagcaagaaggcagacagttcaactctgtcagcatcaaagattcagacccaacaaaaacgcttatataaaaggctttgcctataaacatgtttatttaccttctatttggatggatttctaaattttcctggagagtccaggttattgaaaataactgcactgccagtgtctcttggtttaaaggtctgctaaaaattctacaaaaaaactagcaacaaaagccttgaatgtctcaacatatttcatccgtctcatctcagaggtttcaccaacacccaaatgtccagctgtttacatgtgcaatttatgactccttcagtgtgtcgtcctcttttgggttctctgctgtgtgggataggcacagtaataactgtcccctacataagaaaaccatttatttaaaatatcacacaggataaaggcagagttacaaacactgcaagtctgtcaattccactcactgatttttcttggctctccccagccggctatcatctttcatgaagtgccaactagcaacaaaaatactgacttgtgttacatcaaaaaggttttttggaaaaaaaaagaaaaaaggcagaaactcactgtcttagtctttttacactgcataggcctagttttatttcagagcatttcatccaatggtccatctctgttcccacaaacaccttattaagtactattttggcttctttaagctagattcctctgggggaaaaaaaaaaaatcacaatttctccttgtgataaatgactattacattcactgcatttaacaaacacatcatgtcagtagtctagctgaggggaaaatcacaaattaggtaagctgtagtccttatctgaagggattcagactctcaaaagagaagatgggcacaggggtactgtcacttaaaataataatcttagtcataacagcaaaaataataacacattgtgagacagtaacataccactcaatctgcttacaaaatagaaagatacttctgcctttaatcagatccatttacaggtagggctgactttgtttgcctgtgacccatacggtgacactagagccctgtcttctcagaagggtgccatgcttcgtttaatgctctgctgtgtcttgaaatcctgaacaatttttgaacaaaaggtccacattttaattttgtgctagatcctgtaaattggtagttggtcctgcttgcaggctaaaacctgcaaaccttaatctcactggcttaggaacaccttcttttcatattagctcccatggttaaatgagaaaccttggaggcagaatagtgaatgttatttgtccagtacagcctccagttgagatggcaacttcctccttattgaacaggcctgctgtgaatgatactgttgatcttcactggatggcataccctttatcatacatatcttagacctttggagttgatagagaacatctaggccaatggactcattttgcaggtgaagagccaggacatttgggtgactcaccagagaatgaacagttagttcctgacaaagagggtaaaaccaaggccattgctctttcaaccactagaaattctatttgaatgagtgtgatgaactagggtgggagtctgtctgcccagcctattaccttaagtaggcacctgtccacagtgcctggcatgtaacaaatatttggttgaatgcaggcatgtacatatgcacgagcaaatacaaaaggtaataaaacaacaaattatgtcccactaggcacagaatcttaaactttttagttactagtttccttaacaagcttcaaactttcttaaaatcttcaatagtttttatctttcaaggaaagaatgctgttctgataaaaatactaaacagagaatgcaaaataattacgatgatgataatcacagcaataacatttacctggaacatagcaattgaaggaggctgagagatcttgcttgcaactggttcagatatcacatctaataatttccactggatgtgatatctgaagcaatgactggaaaagtgtatgtgcaaagcctgtgggttctcttgacatgtcagtcaatattaaaaaaaaaaaagatgaaaccactacactacagagtaggatttttttacttttagagaaaagtaaaattaaaatcatttccttacggagcaagtacttacgacaccgatgaaaaagggcatgaaaaagccaaggaccttgagttctgtgcccactaaaacaaacaacccaaaagcccacggccaaatagaaaacagaaataattgagcccaggttgattaaatagcttcccagatagtggatcatttgcattaagtctgaatcctttctcatccttagtttcttcaattggggtgataatgaagacacacatctcctaagttgctggaaagagcaagtgagttcatacatgtacagtgcatggaagagtgctatatatacagtaagtactcaataagtattttctgtctatgggctaagcctgaccaagcagtgcctgcaacactgagctcaaggaagaaatactccaaggaaggtaaagaaacgcacaggtagtagagaaactaacatgagctcaaaaaagatgaaaagatgatccacaggcagaaggctaaatcacaggaagtgtcagctctgagtgcttccctcttcctcctcactctggcacaaatatgatacgagcacttcctccctgctcttcaatgtgaaagacatcagagacacaacagaaaacaaaagacatcatccgtccgttgccatgctcacagactagccagaaaggcagttattagacatggagtaggaacttaatatttttgaatgaatgaaccaatgaaaattagtgccctcctcctccaaaaccaaagaatcataagcaggctcaatagatttttctagtaagtcatcatgacagattccccattactgcttctattagggacataggggatgagactgaaggagtatgccaaaggtgaagatcttcccagaaattcctaactataaagctttcacagccggattaacatgcttctctcagcatggatatctatccgtatatgggtatgtatctcaatatgggcatctatctgtaatgtgtctcatagaaaagtgtaagagcagccaggcgtggtgcctcacacctgtaatcgcagcactttgggaggccaaggcaggcgtatcacctgaggtaaggagtttgagaccaccctggccaacacagtgaaaccccatctctactaaaaacacaaaaattagctgggcatggtggcagatgcctgtaatcccagctacttgggaggctgaggcagacttgcttgaacctgggaggcggaggttgcagcaagccaagatcgcacattgcactgcagcctgggcaacagagagagactccatctcaaaaaaaaaaaaataaagacagaagagaagaggaagagtttgccaaatgggtgatcttgtcattgatcaagaagtgcaagactacctatcactcattgtcatcccaaccagtgggaccagtcaacatctttcttgagatattcacacctcaagaggaagaaatgaagtaccaaatgaaatgtggggagcggaagggtggagaatgacaagtgtcagccatcatttctccccaggctatgaagacaggcttaagcaactaaatgcaaattaattactttattcatatatcaaaaaaaaaaataggacatttacacacacaagcaagactcaaagacataaagacttctacagttggaagattatagacttatctctaaatatccacatctggtcaacccccatccccaaaaaaaccttttctaaaaatggatcagtgctagagtgatgtgggagaggagaagagagtgtgatggtgaagtgtccatcaagttttaaatacatatttctatatttatataagtaacatgacaagttgacaaagtcctttccaacaggcagacagatttgtcagaggtgtttgaaccacagtgactccatcttgagtaggggctgggtaaaataaggcagagacctactaggaggctgcattcccggaaggttagttgtgtttagtcatagggcgagataggagatcagcaggatacatgtcacaaagaccttgctgataaaacagcatgcggtaaagatgccagccaaatcccaccaaaaccaagatggcaacaaaggtgacctctagtcatcctcactgctcaattatatgctaattgtattgcattagcatgctaaaagacacttccaccaatgccatgacagtttacagatgccatggcaatgccaagacgttatcttatatggcctaaaaaggggaagaatcctcagttccaggaattgcccacccatttcctggaaaactcatgaataatccaccctttgtttaacacataatcaagaaataaccataaaaataggcaatcaacagtcctcggggctgccctgcctttggaaagccattctttattcctttactttcctaataaacttgctttgactttattctatggagtcgccctgaattctttctctcacaagatccaagaactctcacttggcgtctagatggaggcccctttccagacatggatacatttcctgtatatactcacacagacatacatatgcccttcaaaggaggcatgcttagaaataaaaataaataaataaataactgatatattagcaattgataaatctttataaattataaactacaatgatatatatattttgtgtggggcgggggtgtgggaggtctatgagagagggagggaaggaggaagagaaggagatggaaaagggggaggtgggaataagagagggggaagccagacacctaggcgtggttattggctacacattgagctggctgttttaccaaggttatcagtctttcagagatcaataataaaatgatatgaagagaacgaggatacctattttcaaaaatatgcttccaaagatgtctgttgccggacatgctggcagagaatagctgcatgatgcaaaattccattactttatcatatccatctatgttttaggtatatttctttaccaggacatcatagccttaaaagtcactcaaggtttctattgcagctaaggtcagaatcctaaagttgtgcattcactccctctgggtcctagatttttgatcacttgaaatgttctgtttgcaagtcgaagcagtgagtctcaagcttaagtaattatggaccatatatgaagaagaaaatgcccacgcggaaaataagtcaagtgaatgcatttactttatttttattgaaatgtaacttattatgcacaaatacaaattttttaaaacaaaagcaatttaaattatttcaattcgaaattacgtagttttactaaaactcaattgtccatattgaattttgcagtagaaaaatagagtctcaggccaagttatatatttgaggtttttgggggggtgctttaacttctaaatgttagagtgtctatttacataagcatgaaaactattgaacagaaaagttattaggaacttcaaagctttgcttgcaggttaaggataatcagaattcaacttaaccaaatgctggctggggagcaatcccttcatactgattttacagatttacctggtaaatctgaaaagatattttgttcacagaagactagttttgaggaattaaaaactgcattaaatggcatctaaaccaattactgagtctgggggcaggaagggaaatgctataccatacaactgctaagactacttctaacaaatgtaggaggctgttacgtaaaaatgggaatcccactcaaaacataaacatagtactgcccgctcaccagggttcttgggtctgcccacacctcactgtcccacactcacttccctccacccctcttttttctattcaaatactgcaaaaatcttttggatttcctgagccttcgttttagcacatgacaattataggaacatacctgcacagagttaagaaatccatggctttgcttagtgctagtttcatcgagatgacccagaaaatacttttatgactgttcttaatttgattataatcaaaatgaaaaatgtaaagtaaaaaagagcttggatttccatccaaggatagccaaactccagtcagtgaagcctagagctggctgccagggcagcactcagagtggctgagtaacctatccaaggacacccagagggaatgcaaacttaacgtgctcctaacatcttccccgtgctcactccatcctagccatactggcccccttctgttccttgaacaaagctctcacctgtctcagggccttgatactggctgctctctctcagtggtatgttcttccccaaacctcccaagactggctctatgctacactcacttttcgcctccaaagtctctcttgaagaggtcttctggtcttttagaaccagtcagtttctagcattcatggaactatcttaaatctctgccatagctcttatcactctcagatgttctgctgggtatttttttttttttttttttggtttatttgagatggagtcttgctctgtcgcccaggctggagtgcagtggcgccatttcagctcactgcaacctccacctctcgggttcaagcaattctcctgtctcagcctcctgagtagctggattacaggcgcacaccatcacgcccagctaatttttgtatttttagtagaaacggggtttcaccatgttaggcaggctgttctccaaatcgtgacctcaagggatccaccggccttggcctcccaaaatgttgggattacaggcactctcagatgttttaatctatgtctgaaagtgatgagagctatggcagagatttgattggcaagtttatttattcactgtctactagaatataagcaccgtgagtactgggaccttcttggtctcacttactgctgcgtcccatgcacctaggcaagtctggcacattataaaccatcaataaacatttgtttaatgaacaaatgaaggaagaaacaggaggcacggggcacagaaagatgatacaactgcccctctatttaatccagtccactacccttactctgaatgcttcacatcacattgctcgtcttaattgttttcaaacaaacaagtccagacgcctgctcacaggggtccctagtgggctcctgctgtccagccttgctccacgtgaagatgccctcttcacagagcaatggatccccctctcctggttccagctctaggagtctcaccacaatcccaccagcaaaacctctatctcctgcctcaaattctggacacaggatatctctcccaaccacaggaacactcctgtgccttctacctcaacacgcactgcttcagcacagtgttttgaaaccctttagtctgagacacacctgtaaattttcagaacttccccattccccaccccacagatacagtaagagcagcaccaggcttgtcgggttttgttctcctccatgtgtttcccagcagcacttagcaaaaaaaagtattaaatgaaaaaaaaaaatggactgtttcttgctttcaggaacagcatggacgaaggatccagggaggcagagggatagaatggcccatagctggctttataagagaagggggaagcaggcgcagtccatgcgcctctggtagagagagagggttgagtctggggagcctgcctgcatgttgcaagaggccccccagggcttccgagcagaccaggacgtggtttcccattgatgtgccctgtgtaagctcctccagaggcagttcccactggggaaattccctccaaggagttgtcacgccccctttcccttccttctcatctggataaccctctttgcttccctgtatctcttcaaagggctcctgcctttcagcttctggctagagaatgaaatctgaaatgcagccagttcacaggaagccagccagctgggtgcgcaaagaacccagaactgtttcacacctcaggctcctttcacaatgcaaatggatacctgactcaggcactgcggtacaggacagcaatgtgcacgcttcttttatgtacgtattttttttaagcacagaatctcttcttccaagaaaatggtatgcagaaactcaggatagaaaaccagttaggagcagaggttgggaatctcaaagccactccagccctttcgccctgaattgatcctacacatgcatctatcctagagaatcttaggaacttagcagaacacagcttaaacagtgtcataagaaagaaagcatgtgagctttcttatcaagacagacctggcttgaaaatccattctgttacttactaaactctcttggcctcaatgtcctccttatctctaaaatgaggacatatacatctcctaggattatggtgagaattaagtgataacggaggttaaagaggcctactacccatcctgggctctcaagaaacaacacagcagctgtagggacaggagctaatagtgtcatgtccatggtttggtttgtcatttctaaacacagacacaggcattcctccacttcccaaacccaaatccagaaaatcctggttagttatctatcactttttttttttttttttttgagacagggtcttgctgttgcccaagctggactgcagtgacatcatcatgattcactgcagcctcgacctcccaggttcacgggatcctcctgcctcagcctcccaagtggttgggaggtgtgcaccaacacgcctggtacacaggtatgcaccaacatgccaacagcaccaacagctaattcattttaaatttactttatgtagagacaggatctccctatgttgcccaggctggtctcaaactcctaggctccaacaatcctattgcctcactgcctcaacctcccaaagtgctaggattacaggtgtgagccactgtgcccagcttcctattactcctataatcttgtggcatccaaactcaactttcttaaatattccaatgcaaatatgtatttctgtaaaattattatttttattttaatttttggagctctgtaatagtctcaacacagacaatcacaggtacagagaggacctgggttgtcaatatactggaatataaacactaagggcaggtataatatttaatgaaaccaaattctataatatactgctatattcaaagctccctggtcctggtttacaaagaaggaacaccaggcagaggagaacgaatgaagtcgctttcataaaatcttgccttcatctgtagaagggtgtatggttgttcctctttctattcagtccatcagcccacaaaaagctctgcatttggaaaactggacaaattccatattcactcaagtagaatggcgatctgacttggcaacatgtttccactgaaatttgtgcaaagaaaacaaaagggaaggacattacatccatatccatgttctcctcaccaacaaaacccttgaagactggaatttccctgcctgtcttctgagcagatgaggacctgagcctattccaacagcctgtggatctatactccacataccccactgtcacagactccactagtccactggagatttctcccatcctatgcactttgtgagtcaaataaatttccattggttaagaagtgtgagtgcagctgccatttttacttgttaacttaaatatcacaataaatgaccaaattagagaaaaccaagagaatcagagagaagtcaacctagaaccctgatatcaccaaattgctgattaacttacaaacaaaatacaccaccatcaccacttgggaactgtctatcttctctatttttaggaagataagttttccttgtttaaactgtgttgaggggccaggcccggaggctcacgcttgtaatcccagcactttcggatgccaaggtgggcagatcacctgagggcaggattttgagaccagcctggccaacatagtgaaacgctgtctctactaaaaatacaaaaattagccaggcgtggtggcacgcacctgtaatcccagctacttgggaggctgaggcaggagaatcacttgaaaccgggaggtggaggttgcagtgagttgagatcatgccactgcactccagcctgggcaacagagtgagactccatctcaaaaaataaataaataaacaaacaaacaaataaataaataaataactatgttgagttggaatgtcttctagatgtggcccagagcattctgattaacccattcaacacagcacctgccacacaggagatggaaaacaccatcactgtacctattatgacttcttccatctctacatcccttcgctccctccattattacttcccctgcccaatatcccctcaaaacacaccatttagctccttcaaataccttttttagatttatgcttgtttggcatattttcccagagtggctgtatgtatttaatatgattaacagctttagtcattaaacagcatttctttaagaggattgcacgagattacccttagggtcttgggctgaaatcattgcacttgtacacaaccagtgtaggtaatggaagttcatcataatgtaacaagttcactcagtacttaatataatcgaggacacaatccataaaaatattcttcctaaactaatcaaatcattaaaatgtcagcttctacacagacgctccatggcactcctgcccctggcccagattcaattcaaatggaattttgctgaatcgccctgatttatgaagtctgtgtttcttcatcctgccccctccctgttgcttaactctgctgcctgaatatagttgtcccagcaagaaaataaactggctggaagccagaagccatgacacaaagcaagctcttgtcaaacggtttccttattagctgttcacatacaataaagactgtaaggtttttcccctgtatgcaacgcgttcagagcattttcccatttgttggaaaactgagatcaggaagaaaaataactcttatgcactacatgccagagagagagcactggattcagtgagagagaaggagaaaaagagtgtgtgaatgtgtgtgtgtacacacattgcagcccatggtttattaacagggcctaattatgacaattgcttcctgtgggtctgtaatcagcctggtatttctcaaagcactctattggagcactgctcactctagtcacagattgcctgaatattctccaaaacaaaactgataaaaataaacagctcgttttgagggtattcacttctgaaactgcagtaccagacacctcaataggaaatatctcatttgccccacactattccaaacccaatgcttcacattcgcacatttcctctacagagatccagaacagtttctagactgcagtgctatccactatgatagcccttgtctagccccatggggtgacttccatttaattaaacagaccaggcacggtggctcatgcctgtaacccaagcactttgggcggctgaagcaggaggattatttgaggtcaggagtttgaaaccagcctggccaacatggtaaaactctgtctccactaaaaatacaaaaattagctgggcatggtggcggggacctgtaatcccagctactcaggaggctgaggtgggagaattgcttgaggccaggaggtaaaggttgcggtgagcagagatcacaccattgcactccagcctaagtgacaaagcgagactccaactcaaaaataataacaataataataataataaacaaaatttaaaattcagtttcttagtcaaactagccacactttgagtgctccacagtcccatgtggcttatggctggaacactggacaataaagatagagaatatttctggcatcacagaaagttctcctggacagctccataatctatagcataacacatcttcaaatgaaagggtcaaaaaatagctgaggatgagcagttatttttctttacaatggtaaaaaggagtgtgccaatctctataactgttaaaggaggcatactcataattatttttatttttcaataagataaatttggacccaatgcccactggcatttttatcataaataagtgttaacacataagcataaaataatcaaagaaattcaagaaatatttattgaataatcactatttgcaaagcactccatcctagcacacattcactgcctcagctcccacggaaacccttcgagcatccatcagtacatcccaggcagtcacggccatttgccattcccaagtaagttatacaatctcatgccccctccttttatttttcaagctgtttttttttccccccaatggaagcctcccttgcctgtaaaaattcaaagccccactcaaatgccacctattccatggactgtcccccagccctgcaagaactagcccatcaataatagcattcataacaacagccaacatctgtgaatgtgtgtcaatttgtactttacacagacagtatcttatttaatcctcacagacaaccctatgaagcaggtaccactgttgtttccatttgaagatgaaaaatagtgaccaggcacagtggctcatgccagcactttgggcggacaaggcaggtgggtcacctgaggtaaggagtttgagaccagcctgaccaacatggcgaaaccctgtctctaccaaaaatacaaaattagcagggtatggtggtgcgcgcctgtaatcccagccactcgaggggctgaagcaagagaatcacttgaacccgggaagcagaggttgcagtaagccaagattgcaccactgcactccagcctgggcaacaagagtgaaactccatctctgaaaaaaaaaaaaaaagaaaaagaaaaaagaataatagtgaaggtgagaaaattaaattacttgcctaaagtcccacaactgataactaatggagctggaatttgacttcaaggccctctaacttcagataccacattcttaaccaatgtcctgtgcactttctttcttgtggtgcatatcctttattcctttcattattctgagttgtgcatacatctgtctcaatctcatctccttcccttgtcaattccttgaacgcaaaaaccacatcttattcacttttgccctcacccagcacacaataaatagaaaagaagaaacagaagattgttgagaaaatgaatgaatgaatgagtgcttctatttggctattggattgtgactgtaacttgcagaatctagttctagaccaaactaggacatggtggcccttttccatcccctgacatgattcttgggtccaccatggatgtcccagtcttcctctgaacaattttcaccattacaccaataagtcatggcattcaatagcacaggccaagatttaccaactgtcagattctgagtggcagccagaatgtcatccaagaagtaatacttgtttcaagccatctaccctagggcccagcccatgtggacagcagatgacagcaggctacctgcccaggctgactagtgagatgacataggccgactggtgagatgatgtagactgacatccaggggagcaggtggaagaaaatgctggcacagggaacctgtggtataatctcaatggctatggaatcctggggtggaaagagtggcaagctgagctagcattcctggaagagccccccgtatctggaaggcttgaagaaacattcccacagggctaaaagcactaggcatcaaggaaggatgttacagctcatttcaattcaaacgacctttactaaatagctacacagggacagccctggggtctggggagtagctatttaaaggtgaattaaaacacgctgcaccctcaagaaactcattagtctagcaggaagccagacattaagccaatccacagtgatacaaggtgatcttgataaggcctagaatgaggcataagaagactcgggagatggtaacatcattagttcagaatgagaatttctggtctgggaaaaactttacaaaattgaaatctgtctgggtcttgaaggatcagtaggagtttgacctgtgggtacaatggaagctgctggcatcctgcgtgtattccttttattggtcagtgcagtcacccctaggctgctgggatcttgcaggggaaatgcctgggtaattacctacccccacccaaaggcagcctacagccagttagttactgactgatatgggggtctccatggggccatacatgccattcatgctacagattccccaggggttaaggcggaggttggacttcaactagacccacatccttccccagcttcctgccctgccccatcctgcttctcacattcctttactggcttctacaaagaaataattctctcaataagtcacttgcatgagaaaccccgtctcgggactcctctagggaaccctacctaagtcagaggcaagtgggggagcagcaaccaaagtagggagattgtcatgtgcaggcaatccaggcatgaatatctgatgaatgccggcagctctaccacgtatcatggtaagatgttcagatctttattatgcaggaaatacacagccactggacagttagaggaagataagaaaatcagagttcctaagctgcaaaattttaaagcagggactttgctactataacatatggaggggggaataggctaggcccatagttcagaaagctggtggtctgtgcagcctccagtaaggctggatctagggtagtgagagtggaacctggaaaaagggtaaattcaacagaggcagaaaaagcaacacactttgcaaagtagtcaggaaggcaaacccaggcattcgccacacacagcgcagaaagggttgatggtgagtgatcattttttcagcccaaaccacatccagccttcttaagagacctggcacagaagagctctgttcatatacatggcacaccctcatgttaaatctttggttattccagaatggatccttctaaaagtttcaaacacaaaactcactgtcacttttcttcaagtgaccactcattttataatgaaaacatgaggtagaaatcacaacttcaagcctcctgccatccagtttaagacctacaggcaaaacgtacaaatggctgggcagcctcacccctcttgctgtgtcactccacactgtgaatgccatgactgtcactgcctgtgctaatgctacaatcctagttctacaagtggaatgcacagtatcatcctattttcagatgggacaactgaggatcaaagtaagttgttcaaggagttataggtctaatgggccccaacactgatgaccttcccatcacctgctgctaccgtcttagcctcagtaatgtccaacctcattaattttaacatggaggacccatccatatattaaaatccaattcttctactctttaaactcagctcaagcttcattccttctattaagtctgtaacccaaatgaatcagaccttttgctgcatcctcattgtacctgtgtgcacagaccacaactgcaccacctatatactacatacttgaggcatacatttatcatcactcctctgggtttcttccttatgagactgtaataatgtaggggaaaggcagacctggcccctgtctttatacccccagaacctagcacagaggctggtaggagtaaatgataagaaaattatactcaaggacgggtgcggtggctcatgcctataaacctaggactttgggaggccgaggtgggcagatcacctgaggtcgggagttccagaccagactgaccaacatggagaaagcccatctctactaaaaatacaaaattagccaggcatggtggtgcacgcctgtaatcccagctactcgggaggctgaggcaggagaatcgcttgaacctgggaggtggaggttgcggtgagctgagatcatgccattgcactccagtctgagcaacaagagcgaaattcggtctccaaaaaacgaaagaaaaagaaaaagaagattatactcaaatatccaacaagttctgttgaatgtttttttaaacattcatatgtaatgaaaattacacttgatatatactaacgctatgatcctaattctacaagttgaataaattggatggcccagggtctactcccagccctgacacgtagcagtcaaagtgatcctggggaaatacagagcttcttggacccatagattattggcacatgaagccattgggctagaaactctcaaacgtctttttgaatacaaagaatcttgttgctactcacatttataataaagcaaaatagtccatatccaattttccagtagctctttgaaatggatgtttgtgaaaacattcatgtagaagccctaagaagtttagccagaaaacctaactactttcttctttaaagagtatttgctaaggaagcatttatttaggcaattttaaaaaatggttttaagtctttaatgtaaacattgcctgataatggcaagagtaggggtaaacagacactactacaaactgctagtaagaaaataaattgggaggtcttttgtggaaggcaatttgacaatttatcctatggaaatacctgaggaggcttgtaaagaaatgctatgattataatagtcacagcaccgattgtaacaatgcatattgcaaccaaatgacatacaattatttgataaattatagtatatttatgcaaaggaatactatatagtcacatacaaaaaaaatgtgtttatacaagtatattcagtagaatggaaactgcctagagtagactgctgggtgaaagaagcactttaggaggcagtgatgatattcctgcaaaagaaagtacatgtgagtgtttgcacgtacatgcctgtggtgtacatatcagcatatgagcacacagatcacaatcaccaggaatatctgagaggtaaaattatcagtgattttaaattttgccattgatattacatgtgtaataatgtacgtgtgtattttgtttctagcttgccatatgaaataacctttagatattggggcaggaagtgcgtagctgggatgtgatattcccacctcctttaacagtgtgctggttacttaggcctcattcttctagtgtcattcctgttttggttgcagggtcacctatgccagggccccagcaggtactcctggcaaacctcaccaagctgtatggtttcaccctcccaccccctctgtatgcgccataggctgttatctgctgtctagtttcaactacctttctcagaaactctcatttccgtatgaaagacagaagggagatcaaaagtgtgtggctggttttatctgttgtctctctcctaattctacttttaactactgtaaaagaagtggaatctggcagggcatggtagctcatgcctgtaatcccagcactttgggaggcccagacaggcagatcacttgaagtcaggagaccagcctggccaacagggcaaaactccgtctctacaaaaaaatacaaaaaaaactagctgggtgtggtggcgggcacatgtaattccagctactcaggaagctgaggcaggagaatccctggaatccgggaggcggaggttgcagtgagcaagattgtgccactgtactccagcctgagcaacagagcgtctccaaaaaaacaaataaaaaagtgaaatcggagttaatgccccaaaggcagcatatattgtctcagtgctccattaattttaacttaattgttctggtactactctttagagctgtttatttagtatttgtttctgactgatgaatgtgaaaaagcgaacattcttattagataacaggtttgcccggctatgaccgtactctgcacagaagactatgtaggcatgacacatacacaataggttttaagacagaacaattccattaaaattggaaaaactcaaatatggttgaaatgcttattaaagaagaatacacatattaaaagaacaggcaattttcattactgatgctatttctaagcctatcccccaaattcaaagtacagcaattattattgacattgttataccaacaatgaaaataatatcaccatttctgagaacctctatggaccaggtctatgctcagtgctaaaaaaatagatcatctcggccaggcgcggtggctcacgcctgtaatcccagcactttgggaggcggaggcgggcggatcacgaggtcaggagatcgagaccatcctggctaacacggtgaaaccccgtctctactaaaaatacaaaaaattagccgggcgcggtggtgggcgcctgtagtcccagctactcaggaggctgaggcaggagaacggcgtgaacccgggaagtggagtttgcagtgagccaagatcgcgccactgcactccagcctgggcaatagagcgagactccgtctcaagaaaaaaataaaataaaaaagatcatctcacttacagtccccattttattgatgaggaaactgaggcctagagaagttaagaacatcacacagcaagttggtaaagctgggtgttgatgcccatgcttgtaacccctgtacatcacccttcctcaatcaaatcatcaggacccctctctgaggttccattttagcacttagagaccctggtgattttttagtctagttcttttcaagctggactccacggagctcttgatgccatttgggcaaaggggggcaagtttaaggatcaggggactccactttcctcttccagttgaagtgctctgtggtttttattttattttatttttgagatggagtctcattctgttgcccaggctggagggcagtggtgtgatctcggctcactgtaacctccgcctcccaggttcaagcaattctccatcctcagcctccggagtagctgagattataggcgcccaccaccatacccagctaatttttgtattttttagtagagatggggtttcaccatgttggtgaggctggtctcaaactcctgacctcaaatgatctgtccgtctcagcctcccaaagtgctaggattaggtgtgagccaccacgcctggtctgtggttatttatttcagatgttagacttgcccatgaaattctacatctacagaatatttgaaaaatatcaatgtacaagattactgtattatgttttgtttttgttttgttttgtttgagatgcgagttttgctccttttgcccaggctggagtgcaatggcgcaatctcagctcactgcaaccttcacctcctggattcaagtgattctcctgcctcagtctcctgagctgggattataggcgcgtgccaccatgcccggctaattttatatttttagtagagacgggattttgccatgttggccaggctggtctcgaacttctgacctcaggtaatctgcccgcctcggcattccaaagtgctgggattacaggtgtgagctaccgcgcctggcctagattactgtattatggatgaggaaactgtaatctaatatcaaaagtatgactggggtctagagggtcttcattttaatctgcatttgctaatgaggcatatttgactgtgtctaactcagttttccccttggcataaagacttgagtaatggttttttgttttttactttatgtcaacgctctgagggaggacgaataaaagggactgcaaagcacttagtgcacagtaaagtcctacataagcatttgtggcgcctaatcccagcactctccggggcctgctcctgaagctggtcacagagaaggaaggtacagacagaccagggcctgccaagacacaaccagggcgctgagcaacctacaggagcgggcaggcacgtagcttgggcgagcatggaaaacagacaaaagcgtcatccacaaatggagccaatcctatacacgaggaccagtcgtgggctcctagcttgtttcagcaaacagcaggcattgatccagggcagggtgggagggcccacggcctctgaattattaacttctcctgttcccacgtgaacttcaccatcagtgcttacaccaccacctggcaccgttcggagggattttccaccttcctctggggaaagtgaaacttatatggaggaatgaaacagaattgacttctggcttctctttgagaaggcttccttcttccacaattgcttcatcttcattttacagaggaaaacgtggatggctttgaggccagttttatgatatttatggggcggatttttgaggagtatatgggttacccgagccaagaattattataaaggagcctcctaagcctgaggcagagagatctgttctgtcttgttaaaagggaccacaataagttattaattccatttaggatttgaggcagaggaaagggcagacatgattacacacagatgtgtgtaatccacataaactaggaaataagccactcttgtgggtaaatacacttgattcccagctacagacaggtaaaatgttctgtctctccaactatggccaaacgatttagcagtttgttcagagctcaaacacataaattatatatacttgacatttatccaaagtcacttttttctttctttcctttaatttcttttgaggtaatgtttacatgaaaaatatacatctgcatcctataatttttaggcatcgactactgtgaattaaacttgatcagctctatttaaagggggatgtttatcgcttaagtgctggcaccacaaattgtcctgaaaaagcacaaatcatcactaagttcagaaactttccaaaagttgatgacactttcaccacaatctcctgaggctcactttagggtccttcacaatgcggataacttggggttcctagaaaggatggtcaaaagttgcctaacttgcaacaatgtgagattaacatcttaatcattaacttaaatggcattcctgactattctgtgaaaagcattgcctcaagaacaaatgatgaatagaaaggaagtgatagccttaattcttaaagagctcaaagtctaatgggggatacaagataaacaaaagcaaggacacaaccctattggaagcaaaaacacagagtgcaagtaattatatctgagtaattagcctcaagtaatactgggaaggcaggcattatcttagcttcactttggaggtcagccaaaatccctattcatcccttcgtgggcctctcatttaaggaggacttttcccaactgctatcagagaacaaatatttggaggtgatttttctgcctccagtgatgaatgaggaaatacctgctccccgtctctgtaatcagtccatcaacactctgagatcttggggaggtgtatgtttaatttatatcctacctctttccaaaaaagatttaaggtagcttacagtaaaggctcatatgcctagggcaatgtaaaaaaaaataagaaatatctaaatacattatagtaagaagagatagaggagggtgctctgaagtagtagcaggttggtcttgcaaggaagcaccaagtttggttggaagtatctggcatgcacagcgaggtgagaggcagaaagaagtcattctgactgcccttgccaaaaaaaaaaaaaaaaaaaaaggagtagtaacaatttatgagatgctaactttacttatcttaagtgacagagaacaaggtcaacaaatgttcaccctgctcaagcagcaggttgtattcttatattttaggatcacggactccattcagaatctaagaacgttctggacctatttcccccataaactcataaccatacaactttacacatagtaccagggttccatgaacctagactgaatacttgctgtgggagttctctgtaaagttgaaatttgtataggaaatcctcaatactcattttcactgaatgcataaaaggtcactagttgaagccagacatctcaaagtaatcctttgagtgtggtttcttcctcctgccatgtatagccaacaatggcttgtagccaaaaatgggatcattccacttgaaggaacttgaccaaaaccctagtaatttgtcttggtcttcattttttcccactctttatcttgggatgtgcttgcattcttatgctgagatatttttcctgtttatctacttatgttttgggttgttggtttttaattcttggctttcacatattctgcatcttaaattctcctaatttactgtgtaattaaaacacccatgcacatttgttctcaattaatagagacaaattattccccagtggaagacaactctattccaacttgaaactggaagggcagataggcctgaattttaaatgttgtctaacgactctaatattctttgttgagagtatttaagagataggttaatgtatccttgggagacaaatattccaaaaatctcatgctaaccctcagaaccagatgattctgcaagttcccaattttgtaatccttattaagtatattaggaatttgtttataaaattatcctcagaaggaagataaaattaagctggataaaataaaaggcagttgaaaccagttaaatagcctttagtttgaataccaaatattcatgtaaaatcgatgcatccatcataagcctacatacttatggctttagaaatatttgagagcattaaaaaataataatggaccagagagaaagttgacatatttataatccacaggtaagtctaatatcagtacctagtttgtgtgtgtatatatacacacacatacacacatatacatatatatacatgtatatatgatatataaatataatatatatacgtattatatatcatatttgtgcaaacatttggaagttattcatttaagcttcattgtgaatcatttgcacaattacaaaatagattgtaattagagctcaactatttcatacataagtaataatatgatggaaaatactcaacaatataaaacctggtaataaagagacatcttactaattaagatttcaaagggatatttagaaaacgaaagagagaaaaagaatcattcttgaggatctgctaatctgagaaactatcctaagtactttatttaaaagacttcttttaagcccaatatcagtcttatttgacaaatgacattatgcccatttttaagacaagataactgggacttagggaggattagatggcatccaaacattcttctaaaattactaacaaggaggccagatgtggtgactcacgcctgtaatcccagcactttgggaggctgaggcgggcagatcgcttgaggtcaggagtctgagaccagcctggccgacatggtaaaaccctgactctactaaataaacaaacaaaaaaacaaaaacaaattagctgggcatggtggcgtgagcctgtagtcccagctgctggggaggctgaggcatgagaatcgcttgaacttgggaagtggaggttgcggtgagctgagatggcacccctcgactatagcttgggtgacagagcaagatcccatcacaaacaaaataaataaaataaaataaaatcactaacaaggaaagttctagtagtcttgccataaagtcaacaacacatctttggaaaggccacagacctttcgaccagcagctatttcaagtaactgattctcagctggctggttgtaacagccaaatgcggatttacactgagtactttgttcagggttcaacacattttacatcagataatgcctgctgttcccatttttcctagaaatggggtatgagtacaattcctgtttatgtaaactcctgccacaatgaacctttacttggtcaagataggataacacgagggctaaaggaaagaggccacaataggagaaaagctatcttctgccaatatcagggtcaagtccaaattgtccctttagggcttaccctgatagaaccagggataaacacattgggagaagaaatgagtttaaaaacaggcacagaaagagatttttaaaaataggtatattggaccattagaatagatggactatgaaatgtacacaaagatgttattcaagttcaccttgattgttttactgggtcctaaccaggagctttctgtaactagactgggcatatcaccctatcatatgtttaacaggtggactgtactggctttctacattgtactccatgaagaaacaaaaattttttttttaaaagttgtaagtttctatacttataaccaaagaggcaaattatattttggggggagccttattgatttttggaccccaaataagataaggattaaatcaatgtcagaaataataatatgaatacacattagttaaaaaacctaattgtatttgagatcatttccttatggaaaccttttctgagagctaatcaatccctctgtaaaaggagaaagtgagagaagaggtaatgttttagagtgttatcgtgactggttattttaagggaagaacagaaataacttggcaaccaggagtcaataggaatggaagtctttctgaaatgatttgtatatttccctacctaaattggcctcttttactcatctatctttcacatgttatacaaagcctgtttatgaaagtgagaatataggttcagggtctcacagcaaatgggataatggcataagcagactcctgtttttgtgattttctcaaaagacatttcatattttgtaattcagtaaccacagcaccaatttctgagatgtaaacttgattcatgtattcattcatacattcatacaaactagaccctgggaacacaagggaagaatgagtcatggctctgccttcatggaagatacctgctgcctatggaaaaagacaaataacaagaaccaaaggaattatgactgtgatagagacatagacaaatgactatatacaagccactcttctggctactcttgatttagaaattatcctctttatgtagaccacttcctctgctggtagcacacttaatagatgacgtggactatgtcaggtctataagctacaacccatggccaaatctggcctgccacctgttttggtacagcctgcaagctaagaatgatttttacacttttaaagcattaggaaaaaaaaatcaacagaagaataatatgtgaaattcaaatttcaggttcttaaatagttgtattggaacacagccacactcactcatttatgtaagatctatagttattttcaagctaccatggcagaattgaagagttgtgacagagaccatatggctcacaagaccaaaaatattaactattttgctgaccctggtttagatggtttggaccttatctaacataagagtaaattaaaccaatgtcagaaattattagtatcagaacacataaaaacacagctcctagtggcttccaaaagaactaattcggtaattaccctaggaaaatcacccagcacacatcagtcataaaaatcctgtttttaaatacacatcaccacattctgtctttattaaatagcatacacattactggtataggtaataaattatgaaatactacaatgttatctgaatacaaagttagtgtcaaattacttttaaaatatagttggttcatacttgttcaaaaactattcggcaaacatttacagagtagtactgccttccaggtagcctgctaaacagcagaaaaaggaagatgagaatgacagtcatttaaggaatctatgtttagaaggaaaatataatcaaccctcaaaaaatatggtgagacaccaggcgcagtgtctcacacctgtaatcccagcactttgggaggccaaggtgggcagatcacttgaggtcaagagtacagcttggccaacatgatgaaatcccgtctctactaaaaacacaaaaattagctgggtgtagtagttcatgcctgtaatcccagtcacttgggaggctgaggcacaagaatcgcttgaaccaggaggcggaggttacagtgagccaagatcatgccaatgcactccagcctgagcaacacagggagactgaaaaaaaaaaaagtggatgagaaggcatttcataataaagcctcaatattcttttccccactttcagttttgcattggcttaaatgaggtaagccatggaaaatggaagatggatttgtgtagaccaaagaagttcatgaattttatagtaaaataaaggttattcatcaattgacatattataagccatattttgtaaatgactgaatagtagagttagaaagccaaatattaaatagctttcaatattgccaagaatgtctgtgttttaattatcttaattaatttgcctttcttcttttcattcactttccccactgtgtccaaataacgattccctcttttgttgctccagtcttccagggatttgtagactgtcaccttattttgaactctgatccagctggctcctcagctgtcacttagccaactataccaattatatagagatatatagttagatagatagatatacatatatatacatatatctgctataatctttccctataagaccattcagctagcataaccatgctagactgccattcactgaataaaacctagtgttttacattgaatagggatacatcctaaaggctgggaccccagattataggagaaatgatcattctgctcccatgattctgcaaatggtttttcttagcactgtgagccccaatgaagcaaacagcctcatcaagtactctctcagctactctgctttctccactccacctatctcgtatctaatctgtgggtcacatgtatggtgacagtgccaccgtggaagactcaaatgcttatgactcaatgtgccaaacaaccagcgccaaattactgagagtgaatgatgcctctgctcccatttcagattagagtgtgttatgcagccatgtagttgggtcatccctgcaactgttttatcacctctcccattctttaacatttcttataaaaccaatatattatgatgccttcaatattgtcataataataatacatacaatgtattaacaaataaactctcctgtagtcccagctactcgggaggctgaggcaggagaatcacatgaacccgggtggcggaggttgcagtgagccaagatcgcaccactgcactccagcctgggggacagagcaagactccacctcaacaacaacagaaaaaataaaaataaaaataaaaaaactgttatttaccgaaagattattatgtgcctggcactgtcttgcatgctttatatgtattaactcatccggttctcacaataatcttattaagtgctattattatctccaccttacaactaaggaaacaggctgcagtaatccatttctggtcttgttcttcctttctagaagaatctctcctgtgtatctcctctcttcccaggggctgtttgcttgacccgcgactaatggaagcccagctctgactgcccctcaggggatggctcctgactgccctagctatccagggtactgctattctgccagtgaatgatttaaacagagaagcagagaggaagtccactaacgggttccaggaaagtctcttgctcctaagaggagacccaaggaggagactagaagttgtcatactctgatgtgatgtctacagctgtcttgcccccataagatgtccatttgtgacccaaactggcatgctgagatggcaaagtgaagaaaggtaaagtgtctaaaactctagggatatgactgagccatggactgagccaactctgaagctcccctcccactctattcgttgttatttagattatatatgtccttgctaaatgatacaaacaatgaatacaactgaggttcaaaccagcctatatttggagtcttatttgtaatcccacctatacaaggatataattcaaaaccccattacggttctgcaaacactctgcatctgtgaattattcaaaacaaatgccctaccaagagcataacaccatccaactcatatgtgggggggacctgtttctctactggcaatgctctgacaccaaacttatgggtttcttcccctcacaccaacaacaagttctccaacttcctggaaacctacttgatatctaatgattgaattcaattctgacagtaattacccagagttaatgcagacaccacaggttaggggctcagagccacaagattatccctcacttcaaatgccaatcacaagtctgggtctcctatacttctcaccaactgcctacaagtcaggggatctcatgactccctcctcaagttcaatcgtttgctagaaggggtcacagaactcaagaaaacagcttactattactgatttattaaaaaggacataatggatacacatgaacagccagatgaagaggtacactgtgtgatgtccagaaaagtcccaaacacagaggcttctatccccatggagtcggggtgcaccatcctcccggcatgtggatatggttatcaacctggaggctctccaaacctcatagtttagaaattttgagggggtttcatcacataggcatgatagataattaaacaatttccagcccctctctcctccctggagaataggggtagggtgggttagaagttccaagcttctaatgacagtttagtctttctgatgacatcaccactttgaagctatccaggaacccactaagaatcacctcattagaacaaaaggtttatcacccaggaaattccaagggatttgggaattctgtggaagacattcttatcacctctatcactcaggaaattacaagggttttagcagttgggtgtcaaggggcagagaccaaatttttgagacagagtctcactctgttgcccaggctggaaagcagtggtgtgatctcagctcactgcaacctccacctcccgggttcaagcgattctcatgcctcaacctcccgagtagctgggactacgggcaggagccaccacgcccagctaatcttcgtatttttagttgagaggaggttttcaccatgttggccaggctggtctctaactcctggcctgaagcaatttgcctgccttagcctccccaagttctgtgattacaggtgcaggacaatgtgcctggcccaaatatatatttcttatcatgtcacatttaccaagagtgtaccaccattcaccccagcctgcccttatggcaaggatccagcttgagtgtaccccaggcatgactggttcttacattacaataaacaatactcaaaaagatggaacattaacataatgagaaaagcagcagcagatttaaaaatcaaaatgattttagagtatttgctgtttacagataatctgagcctctgccatctattttaagcattattaatgaatgacaacaacacacacaggaaaaggagtgaaagtgataactacggatttttttttaacagcaaaaaaaaaaaaacaagtcggggatcccagacgctgaaacaggaggcccttggcacgggcctggctctgcccagaagtaatcacttccactcactggacctcagtttcctcacctagaagatcagaggggtttataaaaaggatgtgaaacttgaatttcctgactactggtggaagactctgactaccattctatgagaatctaccaaatgattccaaggaagtatttcaacatagaggaaaaggttccctttgctttctcatcttaaactctaaaaaaaaaaatttttgagacagtctcactctgtcgcccaggctggagtggtatgatctcgactcattggaacctccacctctggtgttcaagcaattctcctgcctcagcctcccaaatagctgggactacaggcacgcatcaccatacctggctaatttttttttgtatttttagtagagacaaggtttcaccacatgagccaggctcctctcaaactcctgacctcaggtgatccggctgccttgacttcccaaactgctgagattacaggcatgagccactgcatccagccttaaaattataaattaaatggacatatattccaaggaaatccaagctaggtttccttaaccatgagcatatattcctgatgggggaagaggagagagaaagaaggaggttctgggagtgcaaatacaccagagtgggcacaagatacccgcctccgtgaaggaggcactaccagctggggcctggaaaatgttctgcccaattcaatcccgtgaccatgaagtggcaagtttgaaacatgttgtttcacttttcccaggctgtaacaacagagtcataatttccttcttaactggaaccatctgatagttccggggaagcagttcatggcacgttctctttgctttgtgtcttggcgacagcactgtgttaagagtcaccaagagttacacacacaacgaggggaagagcctcaaaagtgcagagaaaccacagcaaatattaaaagcagaagatctcatgtgtgtgttttaagagttttttacatcacccccttattgctgatatttttggaagactgctaaaacaagatgaaagctgaggattggttaaattcattacttttgactaagttgcaaactatgcaaccagcgaaacagtgctactaaattaatgcctctaaagagatgctggggcctctaataagcatccaataactccctgaatggcagtgagttcataatggcccttccccctggcctctcggcccggaataaacaggctgcaggtcttacggagggagccccaacgggagacagacactgaaacaggaagcccttggcacgggcctggctctgcccagaagtaatcactttcactcactggacctccgtttcctcacatagaagatcagaggggtttataaaaaggcaaactcctcaaggttcccccaagtgcgtttttaaaacagtaaaaccctgccttgcttacacacccagcacaatcatttgagatgttttcatggggcattcaaacgttttgtactttaagaaaaatttttaatggagggtttgggctggaaggagtaaacaaagtttattcttttccttctctgtgtccagttcccaaagaagataaaaatgctaattccagctcaaagttgaaagcatatctgtgcagttcaagatacttaactatgtttcagttgaaatggacttccttaaagatacacttgagataaagttatcaccaacagatgttgaggtgatcttatcttaaccaactcaaacaatcagctcattcttaaaacagagttaatgagactggtaaaggtggaacctaatggttattttggaaaaggagggaagagaacagtatttaatgcctttaacaaactgaatacccacctcaagagttcctgttaccaagtctttttttttttaataagtgcactttctcttcaaaggtttagaaacttatttaaatggagactaacataaagtagggaagaatgcctcaggacttttctcaagcataaatttctttgtgaacaacattcatctcataggaaagcatccagatgttgaaggttcacaggagaaatagaaacagaatgtatggatagagcctagaaaatgaaatctatagagctacatcatcacacttcccatatatgaccctaaaccttctaaaatgaccttgacttcccgaaagagccaaacatgtgtcttgtctcacatttgaattaaatgtgtcacttctcccctccaacaccaaaaacaattggataatgaagaaacattgacactgaatccacatagaaatgaaaacaagactaggtcatcaaaatatttatctgaatcacatctaaactaaaaataatctttctatttaaatcattctactataatttggttgcttaattgctttccaaattaaagcaatgataatagtgaactagagtctaaaaatttaatatcagagaaacacaataatcaagtctattaaatatttattgagcatttactatgtaccgaaaggcactaattttactacctgcacatagaactagagcattcttttcaactagcctaagcaaaagtatgtaatttactaaagttaaattattccattgaaaacagattcaaggcctttttttctttcctaaatatgccatttctctcacaattcttgcacttaccatctctggctcccctactaaacattcccattttactccacatgcaaaatctcctttctgaggctactgagaacaagcaataggttgggtttttctgcactgatcctagttacttcccttgaccaaacagtccaggttctaactgcaatcactaaggggcccttgtttgaactcctaggaggtccaactccacacttcctccaattagcatcacattggacctgagaaattccaacaggttgtgcacaaagtgaaggaaagagaaaatggcttaagaatggctagtgcctgtgaaagctgcatgccttagggaaagctggccaagggacaggcagcttttcccgcaggagacagaactctcctgcctagcacccaaggccggccctgatcaagctctagcctagcacacaaggccggccctgatcaagctctagcctgttcccctggcctcacctctgtccatcactcgcttctgcttcatgtttcccacaaacaactctgtttcattcttctgtgcccttgctagctagcactatatttgaaggccagaagcgtcttcaaattataaccatgggaagcataccactaaggaagaggacaatgtaactgaggcagttctcggcacagtccttaccactgtcatcatgatcacctgcttgaggcagatgctggataagcacttcgcattatcttatttaacctcctcagttcacagatgaggacactggagatcacagacagtaagggagataattatattggacacacgtttgtgtgattacacagcccaagctcatattaaatgcattgtaatatttcttcataatacagctgctcaaaccacagtgaatcaggcacttgagcccggtgtcagcatctaggaacccaagttaaggagggtggctgcctaagttcataatccacttctgcctctactttctctaaaagatagtaaagttacttatcatttcaaagcttcattgtgacttcacagagttgtcatgaacgttatatagaacaacagattggcacataataaatacccaggccggtcatggttgctcacgcctgtaatcccagcactttgggaggccaaggcaggcagatcataaggtcaggaattgagaccagcctgaccaacatggtgaaaacccatcttttgtaaaaatacaaaaattagccgggtgtggtggcaggcacctgtaatcccagctactcacgaggctgaggcaggagaatcgcttgaacctgggaagcagaggttgcagtgagccaagattgtgccactgcactccagcctgggtgacagagcgagactccatctcaaaaataaatacataaataaataaattaaataaaatagatacccaataaaatatacaaagttgtgaatttgtcttcaaatttagtgcaatttgcacttttcatggtaaaacttgaaactattttgtacatgtaatctaaatgcaatcctccccaacattttaactccacctcaactttgctttctttgaaagcttataaaaagctccaaccttaatggactcttccagtttttatttatctaagccaaacacaaataattcaccaccaccatcaccctgtcttagaggaactcaactgagattggatagagaaacaaatcaggtaagtgaatacagcttagaaaacagtttcactacttttgtacataattataagtacctggatctgtgtagtgaggaactttcaccatgcataataaagagaaaaatgttgtaatcagtgcataaaattaaaatagtttaattacaatttggttctaacagaatcgactgcctaaggtggccatcttgaggaagtgataagagcatcctggacacggagccaacaaaggatgtttaagcagcaaaattagacatttaattttggaacttcctacttatgagaagcctggggcaatttgtgtgagtgttagtgcactgaagagctacaagaaatcctttgtttttcaaataatagcggggaaaaacacgacagcaatgaaatatgcctgagatggtctacactacacacttatcctggtgattctagtatcaaaaaaagaagaacaaggtgcaatactctgcgcaagagtcataaactcttttgtgggaagtagagggtaaatgggcaaatggtcgtttactttggcattgaggaaactccaactttgaccaaatttcagggcattttcttagccaaagcatttctttccctccttccctccttccctccttccttccttccctcccttctgtctttctctctctttctttttttttaacaggcaaagtcttgctatgttgcccagtctgaacttgaactcctgggctcaaggagtgatcctcctgcctcagcctccagaacagctgggactacagggtgcaggtgactgcacccagattccaatcatttcttgatttggaagcagatatgaggaagaagcataaagattgggggacagggggattctggcatatgggccttaggataaaaaaaatagttttctttgatattgatcattggcttgaatatgctttgcaattaagatttatagtgaatgtaagcaaaaccagcacctagaaatctaaatgtaccaaaaggaatattaggggataagttgacattttatgagtctatacttctgaattctctaaaacagcttttaaaataagctattctaattggatgcaatttgcaagcatgaaacatacgtgcacttatttcaagaattcatatataaagtgagattcagctatatgctgttaaggataaatattcttgcagcaaataagaattgctcttgcaccctaacgatggatctttctaaagagaacattcaagagaaacttcaggtgcttacaacatgcacacagaacaaactcttaatggcgggctgagctcctgctgctggcctgaaaaacggggtctaaacaactcctttcatggtcgccttgcatagaaccacagatctcatagttgaaaggagtcttgatctgccagctctctgcctgaactatgaactcgccacttagtgtcctccataagtgagtgctgaaaaatctgtttgggtaaatggtacctcatgtattaattaagaagggtcagtgcaggggaaaaaataccagcaaggcaatcaattccttctttccactgcctcagatttgtgcatttaaacaatgccacctcagtaggctcatttgtcagtttaggtcactgatttcttcctcagtcaccaggtactaggcaaaactaccacttcctggtagaagaatatgcttcagactacccagtggctatagtaaacaaaccattatctatttggaatactcttctttctatgaatctatgctatgaaaagcagaaactgcttacgttgcttctgtaaagtgtggcaaaccaaatttagccaagggggcctggtgctgtgcctcacacctgtaatcctagcactctgggaagctaaggtggaagaatcctagcattttgaggccaggggtttgagaccagcctgggcaacacagcaagacctcatctccaaaaaaaaaaaaattagccaagaatggctgggcacagtggctcatacctgtaatcccagcacttttggaggccaaagccagcagtcacttgaggtcaggagttcgagaccagcctggccaacatggtgaaacgcccatctctactaaaaatgcaaaaattagctgggctttgtggtgcatgcctgtaatcccagctccttgggaggctgaggcaggaggattgcttggggctgcgagacagaggttacagtgagcccagatcatgccactgcactccagcctagggaatggggaaagactccatccccccacaccccccacccccaaaaaaaagagaaaaaatggtggcacacacctgtagtcccatctaatctagaggctgaggcaggaggatcccttgagcccaggagttcaaggctgcagtgggctgtaattgcactgctgcactccagcctaggtgactgtagggtacacacccctgatagcattaatttaagcatacccttagaatgaccctctagggcagatgcacctgaatgtgtgttccaaggtaggaaactggacatgacaaatctggagagtctttccttatctatgaggaacatctgagctgctctcccaccatcccatcccatcccatccaatagtcttgttccttcccttcctgttccctggaacacaggctgtataggggattgaggtgttgagtttcaggttaaatgaaggttaccagtggaggtcgttagggcaggtgttaagttaaatgccatataaagtacatgatgtctgcaggcagctgtggttttcccgaccagcttgctgccactgagcctgtggttaccttgtccaactagctgccactggaccatttctgtacataaggtggttctcctgtccagccagccaccactggactctctctcctgtattaagcccttaataaaactccatgtcttatttgctggctctgagtctcttctttggccttttgaacacggcgccttctctattcgagttttgttgtggtggtggtggtggtttttcatttttttattttatttttgagacagggtctcactcaatcacccaggctggactgcagtgccaggatctcaactcactgcaacctccacctcccgggttcaagcgattctcttgcctccgcctcctaaatagctgggattacaggaagacaccacacgcctggctaatttttgtatttttagtggagatggggtttcaccatgttggcaaggctggtctcaaacttctgacctcaggtaatctgcccacctctgactcccaaagtgcttgaattacaggcatgagccactgcacccggcccctattgaggttaattggggtttggcacaacagcaaaagagtaacaccctatctctaaaaatgctcctgctaactattttattcccaagaggatgatgtgtgtgtttgtttatgcaaaatatatggagattttattacatgcaacccacatcccctcccaaccctttcatcatgaggttcatttgatgaaagtcaccataattttggctaaatggttatgttgattaaagttagtgaaaactataaaatatgcagtattaagtagaaaccactgtgcattgccaaagaaactgctttggggaattacagtgctttgtatcatttgtttacttatacactttacctatttcccctccatccttttaatttacattatctttaaagataacaatgtaaagcttcagtctagacaaccctcccagctgatctgaaatctggaattagtggaattccaatgaagtgcatataattcttgtctgctaagtttttataaggatccccttaggtcaactccacattggcttctagagtactgcatgtacagcaaattctgatttgtcttcccttcctcctcccctcaaggtatgtgtgtaagcatgatatttgttggtggtagcagtgaaggagtggggagtgaggatagtggacagaggttaattaaatcacccaaatatgatttgtagaatatctcctcttctggtttaattcttctttccaagtacaaccacaggagtcaaaagagcaccttaaaattttccaacaacctccatttgggaggaatgtgaatttcacagaaagagaaatttttgtgggttttatgtctgtgtgtgtgtgtgtttgtttgtttgtttgtttgtttgtttgttttttgttttttgagacaggcccaggcggctggagtgtagtggcatgatctcagctcactgcaacctctgcctcctgggttcaagtgattctcctgtctcagcctcccgagtagctaggattacaggcgtgtgccaccatgcctggctaatttttgtatttttagtagagacagggtttccctatagtggccaggctggtgttgaactcctgacctcgggtgatctgcccgccttggcctcccaaagtgctatgattacaggcatgagccaccacgctcagccagaaatctttgttttactcactgttataagttcaggtgcctagaaggatgtctcctgacacacagtaggcattcaataaatatttgttgaaaaaatgaatacataaaaatgaaaaagtcagaaataaatgatttaactataatttactctcaatacccttcatgttgggcttgagatacgtagtgtcttgtttttttgtttgtttttttaagttaatcattgaaagacacaaccagcgtatcctctggaacttgaaaataaagataaaacatagtataaattatgtgttgtttttctttagtcctaagcacagagcaattttgtattagattacaaaatgtctgatgtctgggcatcagtcagcagcaatagaatattaaagatcagatgggctgattgctactgtttaattaataacctggagtggaatcagtgccgctagttggaatattcccttagcatcagggcactaaatatttccatttagtgtttcaatggatacactaaaaacaagggggaattaccttgaaagaccaccaagagtaatgttggcattttggggtcagaagtctctgattaaatagtttcaaggtttgcagataaatattgtgcaattcaggagatcataagccaactttagaacttaaaggatagttttctaatacatatggaatagaatatttttcttcctctttcagttattttgtaagttagatagaaactgtgaaaacactagcacattgtcagctatgtaacaggctcaatacatattaatcagtgaatctcttgagcttttctctaatacccaaaatgaagctactttcttagaattagaaaaaataatgagttttctgcaactagttactttttaatcctaattatgtgctaactattcacgtagataattctgatatgtggaataactaaaaatcttccccaccatgaacaaagggtaatgtccaaatttccacttggaggaataaccaagcaaagtatttctttttcatcaagggcatgtccatggtaaaataaataaataaacacatacatgcatatacacacacacacacacacatatatacacacgcacatatacatatatatactcacagaaatcacctgttttgttagccaaataatcatgaaacgattcaaagtgtaattatttcccaaaagtaaaaatataataatccaatatagagaaaagtctccacatattcttcaaaggaccaccatcacagttgtaacttcatatccttgtcatggcagttccccaaggcagcatcccattccaaaacgaggattctttcacaaggaatgagatctctgtgtgtattacgacaggattccaaagtttagaacttttcccccttgctattcagcctgttgacaggataataacatctaatttagcacagccatgtgacagacatgtcctcctaaagtgctttacatacaatgtctcatttcatcttttcaacaaggtctgttatattaataataacatctccattttgctactaaagaaactgggaggtcggaaaggttaagtaacatggaggaggtcacacagctagttagcatagggaccaggtgtcaactttggggtttctttgacttttaaagccaggcttttgactactctcatatactaagtctggcgtatcccctctttcctttctttcccgagggatttattctgttctgcatttcattaaatctgaaacataccaactctaccacaatctacatgcaaacaaataattctccattttgatgaagggaaagactaaaaataattctttaagactgagaacaatatccactgacaactttgatgataaaatctatttttattttcccccttttcgtttttcagcctaatgcagttcactttgtcccttaaacaaggtgttccactgctattgagaaaccaattttctctcaatactttattgcaacattatcaagaaactagctacttaaacagcaggtaaccttctatttcatgcataattaccatgcactatattttgatgtgatcctaatggccctaagtacgttttaaacaaaccctcaacctgcccaaatgaaaaacattttgcttcctctgttgcacttgtgtggcaatgataattaacacatcttgggaaattcgggctacatctgattaaatcataacacaccataaaggtctttacaaataatcctttgaagaatccagctgagaaaatcatgaaaagaagaattatgagaaaggaagctcattataattttgtgcctggcacttgaaggtgagcattttgaaatcagtcaacttacccagaatgcacctgaatgtctgaggaaggagagctgtctgtgtgaccaactcttcactcacaaactccatacttctgttcagtttccagtacctttattatgtctttattttagtcaatgaccaaggtaatgctgctctttcctcagaccaaaaacttaaaaagcagtcattaaatattttttaaatttcccttcacaagaggaggtatcttcagacttccatgcttaaaagttcagcacttgagagaatgtgtttataaatggaaacataaaatatggtttgaactaaacaaaacaaactttgggggaaaaaggaaaaccaaacccaggaactaagcctgctttattaattccaaaggcccaaagtcaaatgagatgagcacttggataacaagggcaatcatcccctttaataatggaactatggctattattacggttgttgctaataatgattgcacttgccacttattgagtgcttactcatggattctgctacaacagtgctgagagttacttttaactcacagaacagaaatctaaaggtggagaggtaatgaagccacttgcccaagatcacacaagtgtgtaagaacaaagtggcagatacgtaaaacaaacgagtctaaagatctgatgtacatgaggactatagttaatagtattgtattccatatttctgctaaatgaatagattttagctgctcttgccacacatacaaaaaaatgggtagccatgcaagatgatagacatgttaacttgcttcactatcaaccattttactatctacatatacatgtatctcttaacatcatgttgtatgccttaaatataaacaataaaatttactttttaaaatttttttatttgagacagggtctgtcactcagactggaatgcaggggcatgatcatagctgactgtggcctccatctcgggggcccaagcgatcctcccaccccaacctccccagtagctgtgactacaggcacacaacaccgtgcccagctaattattttgaaatttttagtagttttttgaaattttaaaggtctcgttgtgttgcacagggtggtcttgaactcctgggctcaagcaatcctccttccttggcctcctaaagttctgggattataggtgtgagtcaccatgcctggccaaaatttacttttttcaaatgaggcaataagtatcacagctgaggttcaaactcaggcctgccttaccacaaagtctgtgctctaattaaatactacttattctgccttatttatttatttatttatttatttattttttttttttttttttttttttttttttttttgagacggagtctcactctgtcacccaggctggagtgcagtggcttgatctcggctcactgcaagctccacctcccgggttcacgccattctcctgcctcagcctcccgagtagctgggactataggcgcccaccacgacgcccggctaattttttgtatttttagtagagacggggtttcaccaggttagccaggatggtctcgatctcctgaccttgtgatccgcccgcctcggcctcccaaagtgctgggattacaggcgtgagccactgtgcccagccaattctgccttatttaaagcagtaaatatttgactgtaaactacctattgtatacagctctgtctcttcctgatgtccaaactgtttattaagcaaaaataagttctataccatggtggtatataaaagaaggaaaatgcgaaaagcagacccagtccagaggagttaccatctttattgggaagataagacttttacgaatgaaataattagggaaaaaaacaaagcggccacatttattaccaaaagcctcggggcagggtccaaatcttttatgagaagccccattatttggaatccaaactaagtaaaaatgtgaacaactgagatttggtcccttccttgtcatccctgtactgccacccaagaagatccttttatactattttaagagaaattgaaaataataaacaagtagattgtcctcaggaatttaatatttcttaacggaattgaacagagttttccagggcaatctcttccaccattcgtttccatagtattgtatagcaaatggttgtttagcccaacaaactaaaaatgtcaaccacagccttgagaccctctaaattctataaagtgaaacgtctcactttgaaatatgcacattgatcccagagacgcaaattctctcacttttaaggctattgtgaaactaactccagcttcatctttatggagctgtttcaatgtataatttaagaaatcacttccaaatactgaaaaatccgtgaaaatcctgcataaattatgcatgtttgcgagtcccctccctcatgttgtgacagatctgagctatgtggtggtggcagtggtgtgtgtgtgtgcgcgcgcacgcgtgtatgtgcatgcacatgcacacatggtgtggttgagatggaaacctttctcgcaagcttattgaatatttccacctcctacagagcactctgaagaaatgcactttttcaacattcagatgaatgtgaatcagaacggcagttctcccaggactcatcttttatattgaacgtagggtcactgacaggattgaaatggatccaagttaccttgattagctgatttttaaaagattagaagcagccagctatggaccggaggaaggagaactgattctagtgtctgctctaccacaaaaaagccatgagaattttaacatgttacttcaaccctctaaaccacagtttccttttgtgtaaaatgagggataaaccagatagtctttaggtggaattcatgaactgccagcctgcagacgtatttgtttagctaagcttaaccccaagatcttttttatactggagcactataaagaggttttatggcatgactctcaaattttagtgcatgacagactctcccagagaacctacacctgggctgtacccccagaacttctgacctaattggtttgaggcagggctcaggaatctacatttttttttttttttttgacacggagtctcactctgtcacacaggctggagtgcagtggcgtgatctcagctcactgcaactccgcctcccaggtttaagtgattctcctgcctcagcctcttgattagttgggattacaggtgtgtaccaccatgcctggctaattttttttggtatttttagtagagatggggtttcatcatattggtcaggctggtctcaaactcctgaccttgtgatctgcctgcctcagcctcccaaaatgctgggattacaggcgtgagccaccatgcccggccaggaatctgaattttcaacaggggctttcaagggattccaaggtacttggtccatggaccacactttgagcatagtgggttagttgaaattcttggtgatctaagtgctcacatcacaacttagcagttacaaacttcattgagtggaatccaaaatctgacttaaatgaaccggaatcacacactagaggagagcacatgtgctggatgtatccatggagtgcagcagttctaatgctgccactttctgccactcacaagcggtgaatcctgggtaatccgtttttccatctggaaaaataagggcagcaggatcatctcacaggattctcaagaggatgagaaatctcaggggggttacctagcatgattcttggcacagagaagatcctcatgccctgttatgtcttctcctggccccattcccttcaggggcactgcactgcatggagctggcctgcccaagaagcacgaggacaccaggtgtgcacatagcttgcctctcgtgacctcacctgtgcaggcttgccctcagcttcccgaaagagcaaaatgatcttaatttgtcctgtttggggagggagtggactgcaaccacctgcactcatttcaaaacagaccactcactgtagaaactgaaaagaaaacacatttattactcctctcccacaatactacttcacctcccctgccctcaaagccttagtaagtgggcaaattcctaaagtggaaattatatgataaactttggccaagccataaaacacagccgggactaaggtcacaaaacagttactgatgtatgttccctgatcaaagccactccatgacactcacttttaggagtcaaggggactacagaaacttacaggaagaaaaaaaagcaactttgaagataaattagagaagcagtctactcatggtcaaaagacattactctttgagctttatatattaatgaagattaaattcgaagtttataagctctttgtgattattaataattcaattacaaggaggtacagaagccattcaaattaatattggcgatgaagggctaaagaatgctcagcacccctgctctccaccaaaaaacccactccatgaattaattgtggtcacgtaaattatagatgcttaatcatcatctgggttgaactctttgcaaatggtatcccctttcttgacatttttccaaaaggaaattttttagttatatgccaatgcattcaagatcaccaaaagtgctgttaataacacagaagaccgggtgcggtggctcacgcctgtaatcccagcactttgggaggccaaggtgggtgggtcacctgaggtctggagttcgagaccagcctgaccaacatggagaaaccctgtttcttctaaaaatacaaaattagccgagcgtggtggcgcatgcctctaatcccagctactcaggaggctaaggcaagagaatcgcttgaacctgggaggctgaggttgcggtgagccgagattgtgccattgcagtccagcccgggcaacaagagcaaaactccaacaaaaaaaaaaaaaagaaagaaagaaaaaaaagaaaaatgaaaaacagaaaaatgaaatggaattgggaccagaataggcttcaggatttccagagtgcagtcaaaggatccactgtgtagcatgcaaaattttatgacttttgcctatgcatttttcagggcaataaatatcgtggaggtatatttactgttttctacttgaaaagcaaatttgtggcaagggtgctgggcacaaataaaattagttaagtgatagatagacacaggaaaggtcaattgctagacaacagtatatgaaaccactcttgctcaaatggtaaaagaggtgaagaggtgtcaggagagcaacttcattatcctctaagtgcctttttccatcccagtgggaaaaaaatgcaaacactcacgcacacatactatggtggcaaatgcaaaatcgaataccaattgctttcttttgatagttttgatacgtgtattagtctgttctcacactgctaataaagatgggtaatttacgaagggaaagggtttaattgactcacagttcggcgtagctggggaggcctcaggaaacttaaaatcatggcggaaagggaagcaaacaggtccttctcacatggtggtggtaagaagtgcagagtgaagaggggcaaaagccccttataaaaccatcagatctcatgagaactcactcactatcatgataacagcatgaaggtaactacccctatgattcaattacctcccaccagatccctcccatgacacatggggattatgggaactaaaattcagatgagatttcggtggggacactgccaaaccgtatcaatatgtttcactagaaaccaaagaaaggctcagaaaaccaagaacagacacatgttgaccttaccttaagcctgaatgataattttcaaacacaaaccatgtagtattttagaaccattgtaaaatatttgattctgtgagaaattaagtgctggtgtttctgtgtggaagtgaaatctctctggatacccctccttgattcaatgtgggcatcctcatgaaacaataaactgatggtagcacgtgatacaagacaaaatgacaggagagtgggaattgcagtaagtccctccttttccactgtaactgctagtggaaaccctcttggtttgagggcattggttgatcctcagtgtggttctaaccagtgttgtatgggaatatataatctgtgtgaacaaacagatgaaaactctggcaaacttcaggatctccatccccaaaggtattgatggctatgtgcaaattaacagctatactagtgcaaattaaaagcacactagtttaacacagggcctctacatcttttttaaaaagtcactttgggaggctgaagtgggaggactgcatgagcctaggagttcaagatcagtctgggcaacataatgagtccctgactccaaaataatttaaacatttcctgggcatggtggtgtctgcctgtagtcctagctactcaggagactgagcatggaagattgcttgagcccagtaggtcaagactgcactaagccgtaatcacgccactgcactccagcctgagtgacagagcaagaccctatctcaaaagaaaagaagagatgaaagaaaagaaaagagaaaggaaaggaaaggaaaggaaaggaaaggaaaggaaaggaaaggaaaggaaaggaaaggaaaggaaaggaaaggaaaggaaaggaaggaaaggaaagaaaaggaaaggagggaagaaaggcagaaagcaaggaaggaaggaaggaaggaaggaaggaaggaaggaaggaaggaaggaaggaaggaaataaatgtcttttggaccagtgtagaccagcccagtggtttagtgccttatcaggaaagttttaaggtaaaaaggttataattcttctcatcccctcccacccaggtgggtcacaaaactattctcatcttcaaaaataactaggtttgattaattaaatatatgaaacataacagataagctctatactgatcttagcagattatagaagagctttcaggttattatcgtttaaaagtcatagtagtggatgaactaagaagagatcaattcaaaatatacaactgaaggcaaaagaattaactgattgttgtctgagctgtcccaggtttcccgactctctgggatccccctcctgccttcccaagccctcttccctgctgtagtatctcctccatgcttcctcatctgctccatggcttcacaaagctgctttacagtgaggtcaaaacaggctgacaccacagattctcaccacctggaatttttgtttgtctgagacaggatcttgctctgttgcccaggctagggtgcagtggtgagatcacagctcactgcagccttgacctctccagctcaatcaatcctcccatctcagcctcctaagtagctgggaccacagcccatgtcaccatgcccagctaatttttgtattttttatagagacagggtttcattgtgttgcccaggctggtctggaacccctggcctcaagtgattcacctgtcttggcctcccaaagtattgggattacaggcatgagccaccacacccagccctcactacctggatttggcttttgttgccacctctcagataacccttgtttccatgatctatgagccagtttaaccaaacccagagttaattatcatatcctaagacaactaatgaaaagcactgggcttagtataaagcacacccactcactccccaccatctctttcccctggctcccaccatataaaatgatccaattttgacataaaatttctaaaataaaaccttggttgaaagccaagtctttgggaacctgtactttcacgttaggaggttacagacttattccaacgataagtgctttttgcacacaagtggccttttggaattgatttctgagttctgggacacacacaggcttttgaatgttctcaatagtggtaagccttaaaccttctgaagacagattgtatttctttggaatgagccaaaagtgtttaggagacaaatctggtgagcgtccagctgggaaataccatttgggtcaaagctataaagtatcaagagtgattttctggtgtggtttgaaaattagctctaaaagtcattccaaaagaggcattccagaaatgtatatggcaataacaccatcaatggaataaaaaatgttttatcccctaaattgactactagatggataatgctatttcatgcctccattcctttaaatatgctatttggtcccttcccctacagtgcaaagccctcaccctcactctatctccccaaatatctaatttgttttcttccatcaaaatatatgtttctaggaagccttctctgaatctccaatctgattctgatgccctcattcatgctctctcatcaccaccccccactcccttcctcccctctaacatgcggggcaatgcttgcttaaaggacattgcaaacaatggttttcattttctgcccccaccaccaaactgtcagctacttgaaaataatggctatattttactttacttgacagagcaatggcttcatacagtgcttcagaaatgcttgttgctcaaataaatccatttgaaaaattaacctccttgctctgtagttttacctcacatgatctgacatacttgtcatctgcagttcaatgtcaacccaggagtaattttacaagaaagattgtgatagtgttgaccctcgacgcttatattagtttttcaacaataatctaaatgctggtagagaaagaaggctaatacacaaaacagtaacatgagctacggaagtgagccaggactttaacaagaaaacataactgaattagtcttcaaaatgacattggtaacttaaagaaatcatttatctcagaataaagaacttaagcaaatgtacacatgagctatttaggcccatattagagctatttctctatcaatgaaaaatacacccagaaaagcttactatgaagcacaattctcagtatgtaaatctattatcttgcattaaaaataccacacaaatagcctaccgcccagcaattcctttgaggctatatagccaacagaaataagtgtttgtttccatcaaaatacatacatatgagaatgttcatagaaactttattcataaatagtcccaaactggagacacgcataatgttcacccacagtagaacgtgtaaacacactctggcatattcataaaacgaatactgctagcaagagcaaagaataagccacagataaccacaacctcatggatcctcacagacataatggcaagttacagaagttacagacaaaagactgtatacagtagggttccatgtgtatgaaatcaaaaaacatgcaaaagaaattactgactgagagaatgcatgaggggtattattgggtgctagaaatattctatattttgaatgaacctggtggtaattacatgggtatagacatacacaaaaattcatacggttgcacatttaagagttggcattttatgtaagcttatactttaatgaaattttaaataaatatgtttagatatctcagtctcatagaagatttaatcctaaaatagtagcagaggggcttggaggtgaagaagtagttaatgagcaatcctggtggggttagggagagaggggtagagacccttttggataagctgagtagctatgcaaaaaagatgatgtcagggcgttggtatcccaagtttgacccctgaaaggagaggggccctgaatactgaggttttaatgtttgcttcctggggcacagtagcaaaatctttggaactgatcattcagggaatcagttactacataatatgttaaggcttatatgaggacacttaatcctgattttttttaaaaagatgaccatatatctggccgggcatgatagcttgcacctataatcccagcactttgggaggccgaggtgggtggatcacctgaggtcaggagtttgagaccagcctggctaacatggtgaaaccctgtctctactaaaaatagaaaaattagctgagcgtggtggcggatgcctgtaatcccagctacttgggaggctgaggcaggagaatcgcttgaacccaggacgcggaggctacagcgagccgtgattgtgccactgcataccagcctgggcaatagagcaagactctgtctcaaaataaaaaaaaaaaaaaaagaccatatatccaagggcccactcagcagagacatcaggtatatcacaaagtaggaaaataaagtgttagtaggaaaagaagttgtcagatgtgaaatgaagttagaatgagttaatgattttagaggtaaagatgatgtggggctcacagtagaccacaagcaattttaaatatgtcagctggatacaaagaacatacataaaaggggagaataatatagacactagacagggcaaattaatccttgcatgaaagaaaatgctggggtgtccctcagttgggttgtggggtcctcctaatcattgcctggcctggctatctaatccatggagggtcagatgagacagagtgagatccacataaatgtctccatacccactacccatgaccagtggcctggtgggtacataataaagaatttaaatttaaggactaaacagtgaagttagccactagggtttctttctccaccaaacttagaaagtccctaaggggagctacgtattgtccagaaatttaacaaaaatgtaaataaggaaacacacagtgctaatgcaggtttcatttcaaagaaaagaattcctgaccacaataattaagagtgaggttgtcttaactcagggtctaaaatcttttgaaaagtatctatttgaaagaaggcaatggaatgcatgtcttctatctgctctgtccccaggatgtacaggtgtccctttgctgatgaaaggtgtaggtggcatgcaataaatggaaatgtcatataccctgcttcctgggtaaggtggccagaattagtatacagcaataaagggtgcccagtgaaatgtgaatgtctggcaaacttttgctcagttatttctgaacaaccacattctggctttaactaaaaccacattgttacgctcatattttacacaaatatttattccaagtggttacaaaatagaaactgagtaataagttcatgactttctccccatcctccatctgcaggctttcttcagccagtaagcacatcatctctttggaatccagaggtcacattcaactatgtaaaagtacttcttatctgaacttttctccctaaaattcataacttatctaaattaatgaaaaaaaaaagactgggtcatatttctgtttgaggattatgaggtggagtagggaagagatgtccttctctggatgacctatataggaataataaactaaaaattcccaggaaagcccagaaaggtttctttacaaatgtatcacagctgcgtgactcacgcttttagttttgacctaatggtacttgtttgaaagcagtgattatcaccagaacatagactccacaaaggctagctttggtttggggtatccccgttcactctcagaatagtccagaaataaagttaacaactacctgtggcgacagtgtgctgtaccacactgataatgccaactcatgttaaattttccctctgaccttgtaatggaggtaggatgggtattgttattatgttaaacatgaagaaacagaaggccagagctggaaaccagcagacctcagagtggacccctagaaatgactccaagtgacatgcctgtcccaccatcagtttccaggccatggccccaagaagaagatgttactatgttgagttaaaaagcaaatgctcggccaggcacggtggctcatgcctgtaatcctagcacttcaagaggccgaggcagacagatcatgaggtcaggagtttgagaccagcctggccaatatggtgaaatcccatctctactaaaaacacaaaaattggccgggcactgggggggtgcacctgtagtcccagctactcgggaggctgaggcagaagaattgcttgaacccaggaggcagaggttgcactgagccgagattgcaccattgcactccagcctcggcgacagagcaagactctgtctcaaaaacaaacaaacaaacaaacaaacaaaaaaacaaaacaaaaaaagatccttatccattacttatgtctgtcttcattactgattacaggagcatattttaatgattgtttggcagagggtgatcaagtagcaaaagttctggaactcagatacctaactcaaaacgaaacatcaaaaatgaaaaaaaaaaaatctagacagtggagcaaccaggagtatcatggtagacagttacaaaagaaaagggtaacacgaacatgaaaaagtcagttcccctccacattttagtaactagaccgggcaaaacaccatttatcctagatgcgtaatctccacaacaaaatgttctacattttggcccctaatctctacccttgaatgggtagaatgactcttcgtctttccaaagcactgcaatagaacagaatgccaggggaaatatccatacaagacagcatttatttggaccattgtacctttagtgagtgacagagaaaagctagaaaataaattaccacttaaacaaattgttttgttcatatgtctgctcccccaatatttctcccagagcaccatgggttactgtaggtgttatcaatgatgaactgggacaggagtcattaatgtgaccatggacaaggtagcaaagctataatgaagagatctccatggtgtaatgactgtggtttcctgtctaagatagctagaagtgtgttactaattcagagagggtcagcactccacatcaacacccagaggcttcaagatgccccacagagaattccacattgctggatgctggcactgactaatcaaagcatctcacatgcccattcccattttgcctgagtgataatatgagaaaagaacaaaggataagagaggaaagaaatgacctgagagtcatcctcgtccttccccctctcttttccccttttgcacccctcaggatgcaatctatccccaaccccagctgagacttcctccaaaatattgctctaatccatacccatctgccatcgccactgtcacctcccaattcaaatcagcaggagcacccatttcacttggaaggagacctccagtgatggggatcctttatccaacatacacaattaatcccactgctaaaatcttccttacaaactacactaacagcccttcagttagtttcctgtttttcaacgttgggctctcttccaacttaatatatggaaatcccactcggaaagtttgcagaagaacaactattctcattaccatctgggttctgacccagtggtctgtactttaacccagatggtcttttatgagggaaggtttgtttgttcgggtgttggtggtttttttttttttttttttttttttttttttttccagtgtgagttcttcagtggaaacttcgctctggttttccaacactgttttcacagcagctggagggcagaggctgctgtcctctctcttgtaaacaaaaaggccaagccgcagtccccggccaccaggacaaacacacactcccgctgcgagggcacccccatgcagcgtgagcacggcagggcagtggtggcggaggaagccgttgtctgctttcttattactgcgctgtcattcatgcagaagtcagcccacagatgcatcagtggcttcctttcaaaagggccattttcttgaatttattgactgtgcttataagcttcttgtgtaaagatgctttgcacaagcttcaagaaagagaacttatttatacaaacccatttaaatactgcctctgtagaaaaatgtgtacggacatcaaaatattcaaaaacaactatctctttatatgaagtcagcagcatggggggttttaaatgctttatttactgtttatatttttaagattatcaatgccaactctactaattcagaaagtacagtaattcagacagtaggagggctgtaactaatctttgcactgcctatgaacaaaggattgctaagcaaattataatgcatgagtaaggttgttccaagaatagataaatatttggcaagaactattttaggtctattctagtactttggagctacccactaatttataaatacttgatctactaattacaacacttcttatctattcatttaaccaggtctcaaaggggcaaggcaagcagcatggagcttgatcccattggtgatgtatgttggtcatttgttcttgaaaaagtactttctgctgggcatggtggctcatggctgtaatcccatgggagatccctccctctttgggaggccaaggcaggcagatcacttgaggtcaggagttcaagaccagcctggccaacatggcgaaaccccagttctactaaaaaaaaaaaaattagccaggcttggtggcaggcaggcaggcacctataatcccagctactcagaaggctgaggcacgagaatcacttgaatctgggaggcggaggttgcggtgggctgagatcacaccacagcacttcagcctgggtgtcagagcaagactgaaaaaaaaggcaggcagaaagaaagaaaggagggagagaaggagggagggagggaaaaagtactttctttcagaaactaaactaaatttcattttttacagtttagattttttttccagattttgtcagaatgagatttccctcaatgattagttttctattgctgctgtaataaattcccataaacacagcaacttaaaacaacacccatgttttagctcacagttctgtaggtcacaagtctggggacatagtgtggctgctttctctgctcagtgtctcacaaggtgtcagtcggccacgtccttgtctagagccccaggtcttcttaggagcacacgtttgtggcagaattcagttccttgcgggtgtaagactgacatatctgtttccttcctgcccatcagtcagggtcactcacagctaccacaggacacttgcgtccttgcctacgctcccttcccccaatcgtcaaagccatcaaagaagatgcttcctcatggactgactctttagctggaaaaaaagtgtctagccccttttaagggctcaccagattatggtagttccacctaagataatctccctattttaaggccaactatttagggctttaattattattacttttttttttgagacggagtcttgctgtgtcacccaggctggagtgcagtggcacaatctcggctcactgcagcccctgcctcctgggttcaagtgattctcctgcctcagcctcccgagtacctgagattacaggggtgcgccaccacacccagttaattttttaaaaatatttttggtggagacggggtttcaccatgttggccaggtcttgaactcctgacctcaagtgatctgctcaactcagcctcccaaagtgctgggattacaggcgtgagccaccatgcctggctagggctttaattatatttgcaaaaatattttcagagcagcacctacattaatgttagtttagataaacagatgtaaatataccatgatatgaaaatcttagggactatagagttctgcctaccattccttcccattattcaaaattaatattttttacaagataaaaaaccaatttaaatttgttccccagcaccattctcctgctcttgacttaaatgttgttgacacttcttcaaggccaataaattagtttcatttcatggtttctctctcccgaacaagatttttagtcttcctgaaggcaactaacaagacctgtcttccttttctacataagtaacaccagccagggaaggttagaagaaggagtcatgaataacagcataaactatcagaataaaaactatgagaccaggcattgtgactcacacctgtaattccaacactttaggaggctgaggtgggaggattgttcgagtccaggagtttgagaccagcctgggcaacgtggtgagatcctgcctttataaaaaatattaaagttagatgggtgtggtggcatgtgtctgtggtcccacctactcaagaggctgaggtgagaagattgcttgagcccaggaggttggcgctacagtgagcagtgttcacaccactgcactccagcctgggagacagacagatatcttttcttaaataatatttttaaaaaaagagagaaaatccaaatggcaacatggacgctcagtagtaacagccccaatgtcacaggtatgttctaaacatcatccaacacttacaataccctccctggccttcaacaacaacaacaaaatagaggcaatcctacaaagaagatcttacattatcagcactaaaaagttaaacaccattttaatagaatcttttaggggaatctaatgaattaatgtatatgtgtttactgcaaagggctacacaaatagatatgtcattgtttctagagctaacaataatttttaagcagaggcagcgttcttaggtatgatgacacatcctacctggtcctccatactctgaatttatcaacgttggctgattttgtttattatctctctgactaccctgtttctccctcctattggaatcttcagagagttgtagttgagaaatggaaaactcacaaacccactatttacgatgcaacaaatattgactgagcccccacaatatgcaaggcactgttctgggtgctaaagctagatagattaacaagacagagaactatcctactttcaggaagcccacatgctacagggaaagacaaatgacaacccagtggcaatgtgggctagagatgtggcaactggccgagcacagtggctcacacctgtcatcccagcactttgggagactgaggcaggtggatgacctgaggtcagaagctccagaccagcctggcgaatatggcaaaaccctgtctttactaaaaatacaaaaattagctgggtgtggtagtgggtgcctataatcccagctacttgggaggctgaggcaggagaatcgcttgaacctggggtgcagggtgaggtggaggctgaagtgagccgcaatcatgccactgcactccagcctgggtgatagagtgaaactccgtctcaaaaacaaaacaaaacaaaacaaaaaaaaaaaacaaagaaaagaaaagaaaagagatgtggcaattaaggaacgcctccctcatgactgactttgagcaaaaggggaagataccttgggaagagtggtccagacaaaagccctgaggccagagtgttgggagaggatgggaaggcagcaggaaacctggggggctgaagcgggttgaacaagcatctggtgaacatgatgtggattttttccttgtgtagacaggaagccgagtgccatgatctgactggacacaccaaaaagcacattctgaaggcctgatggagaataactagaggaaggagtggagggagagagactggacaggatttgaaagagtctctgattagaagttggctgggcaaatctctcccgaactcaaaatgaggaggaaacattaacagtttccaccacctcaaaaatgatcaacaacccgaaaagcttggaaccaggtgcagacaggctaccagacttgtaacacagtcaggaacgctacggacgggcaggcatctcacagctctgactctccaagtgtaatcctgaggtaaggtctttcagatggctgcttaagaggtctttcagatggctgcttaagagaaagagttgcccacctgcctggctccccaagaatgatgaagaaactctgtggcgactctttgaaacttttgaacaccgaaccgctaacaaaggaagtaataaaaagagcccatacataccaaaccaaatctgagggatctctgaataaatttggaacactcaccaagcctgtgctgctcactcattctgccagctctcaaaggcacaagccacagacctctttccacgacttcccttttgctatgcacacatttgccctttgagtttgtttgttttccctgatgatttcagagagaaaacctctagcgggcaccaatcctgcctgttaatgccttgtagttcggtccctaacagagaacttcacagcactgagcatagacagtagaatatctgcatattgggatctctggaatgggacccctggaatgtaaagagttcctagtgtggcaaaatagccacaaggaaaggtgcattaccactgtgtctacatgttcagggtgctctaagtagaaggagatgctgagcccaagagatgaagaactgggaggaaaaaaatgaagagattactaaaagacacatattagagaaacctcaacaaaaaagcttaaaaaaaaaactgttcattagagctacttattcttagctttataaactgtacaaagatgaagcaatcggaagggagtaactacattgatttcatttgcttcagttaaatcaaaatttatgtgaacttaagataatatcaattgttagctctttggctaatttatcacttttatggtttaaacaaatctgaaatgttaaagtgactcacaaatcacttttctatagcattgaattaagttatcactttgttttctccctgtgcactgttcttcaacttcaataatataatttgatgctgtattcttatttcactgattttggactggagatttcttgttttacataaaccctagtgtattcttgacttttttttactaaggaaagcggtgactcctgagtgttaggcaattcctttaatagagttactaaaaattttattactgtatgtaaccctaagtattctgagtgaaaatataaagaaactttccaagtgaaaataaaaagcaccttgcttaactattcttttcttttttttttttttttttttgagacgaagtctcgctctgtcgcccaggctggagtgcagtggtgtgatttcagctcactgcaacctctgcctcctgggttcaagcgattctcctgcctcagcctcccgagtagctgggattacaggcatgcaccaccacgcctggctaagtttttgtacttttagcagagaggggttttgacatgttgaccaactgaggagttgttctcaaactcctaatcttgagtgatccacccgcctcaggctcccaaagtgctgggattacaggcgtgagccaccgcacctggaattttactcttcttttaatgaagaataaatttaggtctaaaaaataagaccaaagcccattaatccagactatctctatgtggccacatctcccagtaggtgtattcaatacccagctttcaataaagagaggaacttcaaattaacaatgagatttaaattctagagaaagctatacattggtgctaggctcattttttaaaaacataccggaccacttcgtgggttcttatttaacagcctgtaaaatgcatccccatagcatggaaacatttgccaagtgttgataggacagtcagtcataaatcttaaggttgccacaaccaaatagaacctgctcatgttgagtataaaacaccatcacatctcaaaatgacttttcttaattaacaattaggctttgcattttcaatgtgatcacaactccagtgaaattaatgcaaaccaaactagtttcagaaatgcaaatttgagccagtgtagggcacaagcagcactttttggaagattcaggacctgagatgcaaggagaaaatgttggtagaaacctcttcccactcaccctacttgaattcgtattctccaaggaacttatggtcgaaaatttctctccaccttaagctatctctgaggttgtatctttagcaaattccttatgggagttggaagcaaaggaacatgaaataagaaagtactatgaacggaatgattgatttttatcttcaaacctgctcgggctggtcctgttttgatggccaacttttctcagacactaacctggagtcactaaaaagaaaaaatttctttcagtgaccagacactgggaaaaccccagatcctccaactccttgcacagcctcccaagatgcagatcaatggcaagggttggggagaactggcattctacctgcattctatctgcgcaggcactggccaattacttggagaatgttccagacactggcacagggcagtgcaggcacttcgtggctcacagcctagcacagcaggtaaaagtttacgagaagagcatggctgcacagctcatttaccaaagtgaatgaaggagaaaagtgcttaagtttactcagggtatcaaaatcagagtcaaatcttaggctctgatgtacgttaaagctcaattttaaaatgctctatgtttaagttgctacctcttaacataacaggaagccatccagtagtcagtttaaattaagaagactcattcatgtaatatcaccacataagggaggctgggagagagtaggtgaaggatacggctggggatgtgggtttaaatactggctgttggtcaggtgctgtggctcatgcctataatcctagaactttgagaggcctaggcggaaggatcgcttggacccaggagtttgagaccagcctgggcaacatagcaaaatctcgtctctacaaaaaataccaaaattagctgagcatggtggcaggtgcctgtagttccagctactcaggagactgaagtgggaggatcacctgagcctggaaagttgaggctgtggtgagccgtaatggtgccattgcactccagcctgagcaacagagtgagatcctgtcacaaataaataaatacatacatacatattggctcttcaatcaacattagagcaaatactctttgccttaattttcccactggccaaacaaggctaatattagtttctctttcacactgttatttttgaggaataattcggttattgcatataaaacactgagtagcatcacataattaacctctaacaaatattacttgttattattactccaaaaggaaaatcaaattttctaaataagagattctcaaaatttagagcacacaaggctcactaaattagggaggtcattacaaagtgtagattcctgggcccagtccaagtgattctgagtaggtctagagtaaggcccagagcctgcagttttaataattatctcaggtgattctgatgcaaaagacgctcagaccacactttgagaaccactgctgtaaaggtaaccacagcatcagcaaagacagtggtagctgctaggaacagagaggggtcaggatcggccgggcagagaggaaaacagtgcaggcctgagcttcccacctccctccacctccagcaccctcccaaccccaatgtcaagagaggcctgcaaggtgcagcaggaacctcttcccatgctgcccccagggaagtctactccaatgcgaagaaggggatagtagaggcaatggacgcaaccgctgcctggtaatgccaaacactgaggtggtccctgtggacagatgagcacaggctcctgccggtccaacccagaattggacaagtggccacacagagacagtctagggggctctcctctaaaatccagtctgaggtgctcattcttttataactacttaaataacaactaaaaataaaaaatctgacaggtgcagtggctgatgcctgtcatcccagctactcaggaagctgaggcaggaggatcaatggggccaggagtttgagaccagcctgggccacacagctagacccctcctctcaaaaaaaaaaaaaaaaaaactattttattttaaccacaactctgtgaaatatctccctttttcagaggaaaacaaatgaaggttttaaagagaagttaagtaacatacctaagccatagcagaggcaaaacctagcaagtcccattggctctagctctaaaatacaaaaggaattcctccccccacccccatcccactgcctcacctggctcctgcgtcggctaagccacattactatggtctggagtacatcaaaagccagcgaaggggtctccttgcttccactccactgcccctgccccccactatttgtgtttatttctgcttccatgttttttgtctgtctgcctccactcaattacacgctccttgagaacaaagacccttaagtgttcagttcattcctgtggccccagacctcataatggagcctgcagtactcaatagctcttttaaactgaccaactccaaagtccattctgtttgctaactgttcctctcatggggaagaacaacttggggaaagccctgttgagcaatcctttgcaaacggccaagtcatactggtatcttaggacagtcacccactcagccactcaaaagaaaaaagttcagaacaggaagtcagttttcagcatcaacatttatacaaaagagatccatctgggcgagatgttagctactcacatttgctgtccatgcctaaggacaacaggtgccatgccctgccagaagagccccactgctttctcacctacacggtcatgtgacagcaactatgccaaaaaaacaaatgcacttgcttatgtggaaaatgggaaaaagcaaatgatcccttagaacccagactggaggcgggcacagtggctcacgcctataattccagcactttgagaggccaagagtttgataccagcctggccaacatggtgaaacactgggtctactaaaaatacaaaatattagctgggtgtggtggtatgagcctgtaatcccagctactcgggaggctgaggcacgagaatcacttgagcccaggaggcagaggctgttatgagcagagattgcaccactgcactccagcctaggcgacagagcgagactccgcctaaaaaaaaagagaaaagaagaaaagaacccagactgggtctccctctcttcctatagagaaagttatctcttcctgcccttgaagacagaagcaattaagaaaaggagagtaattctgtttgtagaactgtctatagcagacaaggaaaaactttcattttaaactaattccagagaactgagacaatctgacagctgggcacagcatctatagaaccagatttcacaaaaaaagttggagaagaaggaaaagccaactcagctgaagcgatatctcgacacattccagcatcctagaagatgagtgcttacacatattcacctgaacctatgccttccctgacagcaaaatgctcaggaaccacttgtgcctctccagtggctgctgccataatgctaaggccggcaagcctaagagtaagacccacagatccagtgctggggaatgcagttcccacttgcataaacactgcccacaacctgacttccttgaagtcttgggcattggcacatgcttcctcatcttgcttgcatttggcaggatctctctttttcatcttttgttttgtggaaagatgcaaaccccaagtaactgcccagtttgcatcgttctaggcaccgtgcatggaggaaaaactctggaaatcactacagaggacccttacatgcaaactgcaaaattaaggtggccttcaagtgtcaacaggctctacaggtgatgacagaactaataatcaccactgctccaacacaagagcctatgcagccaggtactagacttgcactctttctaatcttcgtaccaaccatgtgcaaatggtgttcattatgcctgtttacagatgagaaaaacaaggcaccaggaggcttaacagccttcccaaggtccatacacggaatggaagaaggtttcaaactcagttctccagacttcgatgtcttttttttttttttagatggaccctcgctctgtcacccagactagatggagtacagtggcgcaatcttggctcactgcaacctccacatcccaggttcaagcaattcttgtgtctcagcctcccaagtagctgggactacaggtgcatgccaccacgcccagctaaattttatatttgtgaaatgccatataaagtgcatgatgtctgcaagcagttgtggttttcccgaccagcttgctgccactgagccagtggttactttgtccggctcattgccactggaccatttctgtacataaggtggttctcgtgtccagcctaccaccactggaccctctcccctgaattaagcccttaataaaatcccatgtatcttttgctggttctgagtctcttctttggccttttgaacttggcaactaccctactggagttattttcctttttttattttatttttattttttgagatggagtaagactctgtcacctaggctggagcgcagtggcatgatctcagctcactgcaacctccacctcccgggctcaagtgattctccggcctcagcctcctgagtagttgggattacaggcacataccaccacacccaactaatttttgtatttttagtggacacagcgtttcaccatgttggccaggctggtcttgaactcctgacctcaagtgatccaccctcctcggcctcccaaagtgctgggattactggcatgagccaccacacctagcctccaaatatctttttaagactcactaaatcttgagtctaataagggaatgggtcaggcttgtcatacagcagggcactgagcaagaagtctactaccatcagggtcaaaaacccagcatggcacctctgtgacactctccacgtccatatcagaaggcaattgtaagcacaggcttacatgttattcctgaccagaaagaaaagtttgtggctggcacacaacttttggcaaagacaagtgtctcacctataaaacatgttggcagctgcccacaggggctcctcctttctctggagttttcatctccctccctcacttcacttcatctcaatgtgaacagtggctaaggtaaacatggctcaggtctcttaggaagaaaagtattacataagtgcaaagaagaattactgccccaacttcggaagcctcccaaacacattataaactcttccttatgctattgtaaatattaaggtttgcattaaacattcaggagagcagctctgggtatataattagggagagcaaatatttgttcaaataagcctcaacgggacctcctcctttcaactagctaaaaaaaaaaaaaaaaaaaaaaaaatgttcaagcagatggatataggatacgaaggcttggcccaacatcttctcctagtcctgattactccactcctcagagacccatgaatcttcttaacaaagaagagtcttccaggcctcatacattagccaggcattttctcccaggccttccaagcttccagctccctgcagggcctcagctgacactcttcacaggcacctactttgcaaggcccttggtctcccgacaagacaagcaacacaagccagataaccactcaaagggaggcagtggagatggctctcattccctgccaggaggatcgccataacaaggtggctggaagaaccttccgtggcatgggaacagacagctgtagaccctgtatctaagtctcttcttcccggaattcttattccacagtggtgacagtgtcaagcagaaaaacaccacttttcactactttactgtcatcttataaatctcaatatttcagcttcacagacagcatcttagctgatttcacttcatgtgcaaaaaactcttccttccaaccagagggacatatgagttcagaacccaaattacattcattctttgagaggcagatgttttctgcagataacttgttgaacaatttttaaaaagaaagagagagaaaaagaaaggggaggagacatttctccatttttacatttctttctttttccttcctttagtaactcatatgattaaatgaacagggagctgtgatctgctctatttcatctcctgctggctgatcaagttttaaaaaaaaaggagaaatatgtatgcattcatactcacagctgcatggggatcaacagataaaaaaattactgatggaggaaacactagcatttctccaactataagaactaaacttgacacaagtctctggcccggcaggatacagccaggccagcctggatatttatgtacttgaaaagttaactaaaaatgcaaacacagtgaaggatgaacagagtcaaactataaatgcagatttcaaattccaccaaagtccagaaaagggatatgttaattgcctataatatgccttaagtttatcatctattgtagcaggaagtctcattgcttaaaccaacatttcccaaagcatattattacacagaacaacaccagaaagagaaaaggggttctgttcatatcaaatatgtttggcagtgataccacagcctcatctggagactcacaatccatgagtatagttaaggctgagaaaatcttctggaaggaaacccgtacaactgtaattaaccaggccttcccaaacacctttgattaggctatggaacctactaaaaatgtcctggttatcttgcggagaatacttcaggaaaatgagtaaagaagccaaagtgacaggttttatggccagcctagtggcccttgctcaagtccccatcccagcccttagttggccaatggcatccccaatggccaatggcttcttttcctagattgttgttagaggaaagagatgactcaaattaagatactgctaaaaagttacagagctagcaaagttcttactcttctctaagcaaataccatctctaaaagcggatgctagaactgtgctgcccaatgacacagccactagccacatatggctatttaaatttaaatttaattgaattttaaacagctccccatttgcccaagccacatttcaagtacttaatatctacatgtggctaatgcttaccacgtacatttagaatacgtcatcatcataagaagttctattgggagggctactctagaaagacaaacacatctcaggtttaaaagtaaaggcagcagatttggaaaatcttcattaaaaggacttggatcagctgggcacagttgctcacacctgtaatcccagcactttgggaggctgagccagatggatcacttgagtctaggagtttgagaacagcctgagcaacatggcaaagcccatctctataaaaaatacaaaaattagccagtcatggtgatacacgtctgtagtcccagctactagggagagtgaggcaggaggatcacttgagcctgggaggttgagactgcaatgagccatgatcatgccactagaccccagcctgggcaacagagcaagatactgtctccaaaagaaaaggactctagatcaggtttctgaagtcctatatttaaaagaaatgaccaagccaaatccagctacatccctggggcaacaagctgttttagtcaatctagatccatggagctagcaagtctaatttgctagagaaaatgctccttttacagtatcttgtacatctggcagtgacagaaatatatctaactgtcggatgcaatcagatacagccagagcatttttctaccagtgtaataagaacacccagcagacggtctgaatcctaaatctgaacaccacagaacatcagctatttggacgttaatttgcaactgagtaaatttagtgcagcattaataaatagtcacaggtccaaaaaatgctatatagaagatagggacaaatggcctaagatctgtgtccagagtcacgaagacaaactgagagagagtgtttttgcctaactatgggttctcaccatcaattctgcccttccgcccacttaaagatttcaccctcatttttttaagatcttaaaaatagatggagcttttattctggtcaatcagcagagttaatggttttccacaccccagcactttttgacatcagattctaacccactctagctcagcaacccagcaggggccaatcaatatttgttttcaatgcagaccatgtgttcaggcatctttgttcctctctgagagccagatcttctttagaaaagccagcatggtatgaggattctctaatccaatccaggattcctgctgataggcaacttgtctgtaattcatcaatgatatccccttgggctatggatttttctggattggtgacctgctgggtatgcggctggttttcaatatgcatggcgtgggtggggacacacactgaaaatgaaggacgtggttggcagggtagctgtacagtgctcttttctgaacaagcaatgtagagttgaggcatccccaggaaaagcttaccattttgcctctctgactttgtgtaggcttaactttttgcctaaatgacatctctttctctctctctggcaaactccttagtttactgcaaatttaagatccagttttcatgttgcttcttcaaagatgcccctatgtgtctaagctaatcatccattctctgcttaccatgtattatcatggcatataccatacagctttggagatacctatacatgccttcccaaccacctccttcacatttttatgagcttcattatcatcaactgccattctctaagtaacctgatgccaagtaaccaagtagggattcactgtctgctgaatgaataataaatgaacgaatggactgggtacctggaacaactgtggcagattatttccagatatgattatagcaatatttcttgtcctggtgctctcccagaaccttgccacttctcatcaagaaatggggtctactgcccttgcctttgaatccagacaggataaatataatacagtggaagcaagattgctggctccaaggctacttcccttggttccttctcttaagacgctcgcccttggaacccagccaccatatgaggaggaacagccgactacaggaagcggccacagaaaggtgttccaatggagagagccccaactaaagtctactgtcacctagcaccaactgctagatatgggtgagcaagccttcagatctgtgctgtccaatatggtagccactagtgggtatttatatctaaattaattaaataaaaacttcaattctataatggcactagttacattacagttgccctatggccatgtacggctagtggctgccatattggtcagtacagatatagcatattttcatcacacagaaagttctaccagacacaacgctgcttcagatgattttagccacagcctttgagctcttcagcagagaccctatacatcgtggaacaaagacaagtcatctgtgcaccgtcctatcttaatgcttggccccagaatccatcaacttaataaatggctgtttatgccagtaaattttggagtaatttgtaatgcagactcggtaaccagaaaaataatctttcatattagaattgctgagatcctttgcaaaactgctattcctacatttcttaaagcaggattggaaaggggaaagagaaaagtgacaggcagaggacaaacagaaattgttcaaatggctcattgtaacacaattgaacactcaatctctgtcattgaacatcttagcccattctgggccaagcagctaacatttttataggagaaacaactaaaatttccatcactatctcttgtaggtacaggccagcagagcactactttaattctggaacacttctctataatgttacccagctctcgcacacaatgagagataaagtgcaagatgccttgagttccttctccatgttacacccacaatacctttagcagtagcagtcgttaaacagggaataccatttgagggaagtggcacccctctcaaaatcctcaattgcaatgaagctcattaactagggaagagggagagtcttcttctgcatgtctggacaatttaaagtggagatgctcaaattgaggcattgattggcccttccccgtatggtatagttgtcatactatatatatatatatatacacactttatatatatatactttatatataatatactttatatatatataattttttttaacaaatcgtcataacacaccaaaaaggggtaattttcaattttcagtctgaccaacttggatatgttgatggatgtatatttagagttctactcctacctactttcagaaagaatttatatttatttacaataagtacataaggtacaataaacccccaaaatcatgaatatagaccagggttgagaacctctgtctctaaggggccagatttggctggtggtccatagtttactaatcttgatatatacctagggataagtggttaaagccactaactcaaacagaaattgctttgagaaagagatcaagaaagataaaaacaaactggctaaaccaaaaaatacaatttccattattcagtagaggtacagaatagtaaacagcctactctgtgcttggtctgaaacattagctcagatgagctcattctgatgatattttataagttaataagtactctgaacccccatggttttaatacaaagctgtctttcattggggctcacctctgctccccaaggaacccccaagatgcctcatccccagtgaatcaccctgactgagcagcctttccttccctgtaacatccttcatggttcagttttatgcttttgcaaaggatctatcttctttgagagaggaaacccactgccattcctgcatatggagaaattctgcattttattttactttttttttttttttttgagacggagtcttgctctgtcactaggctggagtgcagtggctcgatcttggctcactgcaacctccgcctcctgagttcaagcaattctcctgcctcagcctcctgagtagctgggattacaagtgcccaccaacatgcccggctaatttttgtatttttaatagagacgggatttcaccatgttggtcaggctgctcttgaactcctgacctcgtgatccacctgtctcagcctcccaaattgctgggattacaggtgtgagccaccacacccagcctattttacatttttaaaagacaaggtcttactctgttacccaggctggagtacagtggcacaatcatagctcactgcagcctcaaattcctgggctcaagcgactttcccacctcaggctcccgagtacactaagacaacaggtatgtgccaccaagtctggctaattttaaaaatactttgtaaagacaaggtctccaactcttgacctcaagtgatgctccctcctcacctcccaaagtgctgggattacaggcatgaactattgtgcccagcctaaaattctgcattttttaaggaggaatttgcctcttttggtagattcatgcctctgttggctgatcatgaggataagaaagcatacatatgaaggtgttctgtgcccatcacacaaatatagaagagctgaatacaggcaaggctgctgggcacttgttaccgagggctaacttgtaaaacccccaaatgagtcagaatgagtccattttggtaaaactgaaagagaaagattacagaagtcagcactgcattcctacttcagctcaattactccctaactgagtaaccttccccaaattagttaaccgttcttcacttgtaaaagcaaggtaataccactaacacgccagagttctgagaagggagggaacataagtcatgtataaacacaaagccagggatggagtaggcccgtgatcaatgttaatttactttccttcttcctttcagaaattccggaatgagaggctggcacatagaaaactaggagtgccatcatttataaagttggttgttttaattttttaatttagtgctttataggattatttagaaataatgcaatgccttactttagggctgaaaacaaccagattctgcacaaaacatctctcactgcctaaaccaataaaaatgtaatcaaataatggccgactaatatgtcaatatttgatttagattttaagaggggatgattctagttaaatttatgagacgctccacaacttaactcctacactccaatcattatagagactagaattgcagaaagggcaaatcttctagaaaatggtcccaagccctaactcagccacatactatttattacctttgtagatgcactcgatgtgatgaagcagtatgatctgaaatatagctgtgttttagttttagatattcttttgtactcctagtaccattctgatcagctcccacagaaacatatcctctaatatgcttaaaatttccactagaaggcaagtggtcagaaaagcacataaattttgaattttgtggggcttacacaaatttaatcctcaatgctatttcaatgcaaggagctaaaatgaaaggactatctcactgcaggggaggcagtgttagtttttaatctgtaggcctttcagcctgatttgtattgttttcttcctcctgcctctccttcctcacctcttcattcaatagttcacaaaaaaagttctttttacacctagaaagaaagaaagattctttaaaaacttaggaaaatcattttatttttcatagtcagaacataaacctcagagctgagctcagaacatctcataaagctaaaaggagatttttcactacttatttctgagtgtatatatatatatatgtatgtgcgtgtatatatatatatgtgtgtgtgtatatatatatctgtactttatacacacatacacacacacatacacacacacacagtttattttttcctgaataccgctccttttggattccttattcatccaagcccatgcgaggtaaactgttgcttgcgtttaatcaaatgtgatcctgttcctcctttatccaaagctaagttatacttttcaaagaaaagaaagtaataaatagatctgtgtgtataaaagacagatggaagggagggaagggcatcagcattaggaaacatgagccagtccatctcacctagacaaaacctttgcagcaaacatgcagatatctacagaggtttcaaaatgaacaatccctgactaccttgacaaaggctgagtttagaaaaatgcatagcatcatgggcatgtctcaaagccttgcagccaccccaaataagctgaaatcctgacaaacacaagggatgcctagagttgcaagccttggttccactttacacacctctctgtgtaaacgaaagttgcccgaggtgatctcttgtcttcctgcctaagaggcaatgtcttagctgtagctaggaactgtttaacttcttattggtcaataacatgccccagcaagcaataaatacgccctgacctcgcagctgccctttagcactgcacgcatcattgatcctgtgggtccttgggaaacaagccaatctgaataaagctaagtggaggccaagtaccatttcccaatgtcttcttgcaattccctagtagctgtaactagaaatagagcacctggcaaatcatcacatcatggatgtcagagttagattattatctccacgagagaaagaaaagagcaagagagactgagattctatctacacaaagaaagtgatgtgatccctaatgtagcaaaatctcccagtcttcacaattaaaactggggagcccaacatatgctagacgaggagagctgaaaagatagattaagagaaaaataattccccattgtcctatacgctttcttcattcgataataaaaatgcacttcattcataaaacacgtacaataaaatatacgatcaacccattcctgggaggttcctgacaggtgagtaacacaaagatagatgagtattattaactcttcagtaccagtagaatatcatcttatttggtgattttctcaattctctactgtacactaccctgtcattttttgtttgtttttgttttttgagacggtctcgctctgtcgctcaggctggagtgtaatgaggtgatcttggctcattgcaacttccacctcccaggttcaggcaattctcgtgcctcagcctctcatgcagctggttacaggcgtgtgccaccaggcctggctaatttttgtatttttagtagagacggggtttcgccatgttagccaggctggtcttggactcctgacctcaagtgatctgcctgcctcagcttcccaaagtgctgggattacaggcatgagtcaccgcgcccggcctccatccatttttttttttaattgaacatgcagtatctactggtttatttttaggtaatgtacacactctgctttactgacataaaatgtatattgtgaaatgtacaaaaataagaagaataagattaagatacattttaaaataatttttatcttatttattaattgtaagaaaaaatgtagtaaaaccaacataataggtcatgcttcgttatttttcaacccagtctatattttataaaccagtgattccaagaacaggtttgaaattcaggattttttttctcccaaaacttggaattaatgagggttacaactacgtaagaaagctaacaaagctatgtgaatccacatagaagtgcatttggggctacacttagaaaaccatgaccaagcttttaaatcccattggccaatttcataagaaaagattttattaaaatttactaatgcatcacagctatcttaatgtctatcagttgttcttgcaaacttatcaaaagaaattaaaccaatgaattcaaaaactattgagacccttgttgaaagacttttttagacaaagtaaaatagtcatttttcaatgctgttttaagctgagaagataggaaagttttaatggtgaatatataccatttttagcaacaaaaatctaacaatggaaatatttccaaataaattattttcaaaataattcttcctcagcataaactccatttaaaaaaacatatatttaatatattagttgttatctttacactaagaagatttaagttaaaaatggtttgtgggaggctgagacaggagaaccgcttgagcctgggaggcagaggttgcagtgagtcgagatagcaccattgcactctagcctgggcgacagacggcgactccgtctccaaaaaaaaaaaaaaaaaaaaaggcttgcctgtttcctgatgtctctttaatttccaacaagcccaagccattaagaaatgagatttacactgttggtgggaatgtaaactattacaatcactatggaaaacagtgtgaatatttttctttttttttttttttttttttgagacagagtcttgctctgtcacccaggttggagcgcagtggtgcgatctcagctcactgcaagctccacctcccagattcaccccattctcctgcctgagcctcctgagtagatgggactacaggcacccaccaccacgcccccctaatttttttgtatttttagtagagacggggtttcaccgtgtgagccaggatggtctcgatttcctgaactcgtgatccacccgcctcagcctcccaaagtgctgggattacaggcgtgagccactgcacccggcctggagatttctaaaagtaggactactatttgatccagcaatcccactcctagtatctacccagaggaaaagaagtcgtatgaaaaagatatttgcacacacatttatagatgcacaattcccaattgcaaaaatatggaaccagcacaaacgcccatcagtcaacgagtggataaaatgttttatatgtgtatatatatatatacacacacatatacacaccatggaatactagtcagccataacaagaaatgaaataatggcattcaaggaacctggatgaaattggaggacattattctaagtgaagaaactcaggaatggaaaaccaaacatcatatgttctcactcataagt

SEQ ID NO: 25 - DNA, 172781 bp, Homo sapiens
ctgtgagagcagccacttctgaagggacagaagaaggcagctttgccagcaagctcatttcccttatctgggaggaaaatgggttttgcaatattttcatattagagcaatgaacatcctatccaaggtctggtaaagtctgtggcctgctgaagctagtaaaaacttgggaaatgttaccaggaaaatctgatatcatgaggcttaaactagcctagacatatgtagagagatcttttaaatggatagataatgtaagtaaacagactattttctgagcctttaaactctattatgataaacctgctttctcagagaagggaaaaatagctccctaacaaagcactgaaaagtatggttaaaaaaaatacttaaatgtaggtatgaatattgctgtacacatgacatttatataaaaagtaataatataaagcagcgtaaagcaaaaaaaatcattgtactgtctattcatgctctacatcagaaggttcatcaagtagctgtaccaatattcatatcggccaaaagaactgcttaatactatgaatttttcttcacatttagctaaaatgtactgaatacctgcactgagtacacacattacatcaggtgacactatgtggaccaaattctctaattaccagtaactctcttgggtgatgttagcctcactttttagatgaggaagtttaggctcagagagattacataacttgggtatcactgagggtgctttaaaccacgggtaaccatacctaacaatggcttaaacaaaattcatttcaagtaatcccccgtaacaaagagtttgaaagtctttgtctcagggctgaatcagcagactaacgataacaccaaggaccctggctctacccatccttccatgcatcctttcttggtgtgttggcttttagtttgcaagcttctagtcttatggttatatgatggctgcagcagctccagacattacttgtttacacagctaagaccacaggccaaataaaagggtgcaaaggcttctcttcctgcaacatcctttccatcataacagaaaatttacccagggccccctaacagatttctccttaaatctaatttggcaaaatggatcacatggccatctgtagctgtaagggatgaagagaaagtgagtatatagcattttcaccattactggaggatggttttgtcaggaaggaaggaaggaatagaggaagaaagggaggaagaggagagaaagggagggaggggagagaagtggtagctgaaccaacaccaacagtgtctggcatattatcaaagttagaagttgatatagctagaactgagtctcttttcacaaagcacgttccaacacaacttcatagcaaaaaaacaaataacctgatttaaaaatgtgcaaatgacctaaataatttctcaaaagaagatatacaaatggccaaacaggtgtatgaaaaggtgatcaacattactaatcatcagggaattgcaagtcaaaatttcagtgagatattccctcacttgttagaatggccattatcaaaaagacaaaacataacacgtgttggtgagaacgtggagaaaaggtaaacaacccttgcacactatgaatgggattgtcaatgagtacagccatttttcaaaacaatacagaagtttgtcaaaaatttaaaaatagatctgttagaaatcccacttctgggtctatatgcacaggaaatgcaattagcttgttgagaagatatttgcacccctatattcactgcagcattattcacaatagcccatatacggaatcaacctaggtgtccatcagtggatatatgaatgaaaaaatatgcttcataaacacaatgggaatactattcagccataaaaaatgaagaaaatcctgtcatttgtgataacatggatgaacctggaggacattatgctaagtgaaataaggcagttgcagaaagataaatactgcatgatctcacttatatgtggaacctaaaacaattgaactcataaaagcagagaatagaatagtggttaccaggcgttggggatgaggagaggaatgtggggagatgttcgtgaaagggtataaagcttcagttagacgagacaaataacttctagacatctatttacagcatggtgactgtagttaataataatggaatgtacacttgaaaattgctgagagtagatcttaaatcttctccatatgtgaggtgatggatatgttaattaacctgatttagtaatttcaaaatgtgtgtatatctcaaaacatgttgcacaccataaatatgtacaatttttgtcaattaaaattgaacaaatatttttaagtaagacaaaacaaaaacccacatactttttaccccacgccaagcaaaagaggtagggaagtcctttctcaggtagttacagcccacaacttttaatatcagtgccatgaccttgaaggggctgctgaaaggttatcaggaggactgctggtgatgatagagctgagatgctccctttaaagcatggggaatctgacacccttctctgagtgtccttgagtttgaggtctctagggagccaagctgacttccctttggggaatagaaagtcatccagattttgcgtggactgaactcaaactcctggagtctgaggagggcttcttatacctagcttgactcaaactcgccactgagtcaagacacttgtcaagtctttaaatgtccttcagtcctgtgccaattgcaatgtacaaaacatctccaactccattcttctgttggtttgttgatttctctctgagtggtccaaatgcattctcataccataccacatatacatttttttgtgaatcattaatagattctaacagttgcatataatattgaaaattatatgcaaaaattataaagtggccaggcacaatggctcatgcctgtaatcccagcactttgggaggctgaggctggtggatcatgaggtcaagagattgagaccagcctggccaacatggtgaaaccccatctctactaaaaatacaaaaattagctgggcgtggtggtgggcaactatagtcccagctactcgggaggctgaggcagaagaatcacttgaacgcgggaggcagaggttgcagtgagccgagatggtgccactgcactccaaactggcgacagagtgagactccatctcaaaaaaaaaaaaaattataaaataatattggaattatttacatcacattcacctataggaacatataaataacataaatatgtatgtaatatggatttaaaacttttatttccatttgcaaagttattctctgagagcctgataaacaaagttgagtatacactttttgtgtatataaacacatgcacacacctgcatgtacacacacacacccatccctgggtagccaatggtgaaataaagaagagagagccataatccacagtctcaaaagtttcatatacaagaagaagcacacacacacacaaaatatcagaaggtccaacccaagtctttgggttggaatcctggctctgtcacttgcaccttggcattaggcacattttgtcatctcactgagactcaatttctcatttgagaatggggacaataatacccactcctcataattggtggggaatttagaggaaatgtaaatgaaacatctagtacaatgcttagcattacccataaacactcacaaacactgtatcgttcagacaaatagaggagagatttattatgtcagtaacacatttggatttcttggctctcaactcttcaaaactcttcagaaatgttttaggagctctaaagtggtacatctaaaggagtgacatcaggcagaacccctaatttcagtggatgttcctagagctttcatgtcccatgtggcagctacaggcaattgatttatcatgtctgtgatgggcaattgatttatcatgtctataatcgtctctagtaaatcattttatcatgtctataatcatctctagtaaagcagatttcacagtcagcttttttcatgatctcctttttaagtcactcacacagatagggaattgccctttattttggtctctacgccaaagtctctcctcctattccagttactacatccttggggaagaacactgttaaattgataagccaaatgccaggacagtttttctagtgtttagagctctctgtttccatttcctccgaagctaattaggtagggtacagctttttagccccttagagtggtaacttttgaggctttgtttaggatgccagggaaaaggcacagtgagtcgctttgagtctaggctgaggttctccaaatatggaccatggtccagcatcatcagcctcacctggaagcttcttagaaacacaaaatctcggatcacccctcagagcctactgaaccagaagttgcattttaacaagatccacaggagattcagacactcagtttcaagatatccatcccagatctataaacttacttcatttaagtaaaggaagtttctgcctagttcaacctagccatctgaaacatgacactgggatttgatataaatttccagttggttaaaattattccttttttgtaacattgccattgttccctgaacttagatctatttctgggtctgctttgagagggcctcctctgtgatgagctggaacgaactggcacaggctcttgagagcccattctgcccatcccttcccaactttgtgttcagaaacatcacattggtaacatgaaattgaccacggcaggagtatttacaccactgaaataggaaaatacaagtcagaacattctttccccctaaagaactggcttatagcccagacatacctgacataaatcaggggtgttggctccctggcataataacatcataggagcatcctaatactattgtcacttcctccacactccaattcttgcaacagagaaagtgcatttcttttcattctagccttggtagaaacggggatcaattggctactaccaaacattgtctcatggaaatgctatagctcaacaattttaatatacataacaaccatctggggtatctgttaaaatgctcttttataaatttactcccaggatttttacttagtagatttgtattcagacctgagattctgcgttttacaagataaagaaattctaatgctggtagtctttagacaatgcattgaaaaaaattcaagtgtcgggcatattgacagggaagcagctcattacgtttacctgggggttctaagagcttccaccacccaatgccctgtgtctccccagagaaataacactctactaatcaaacacactaactctgatctcaattgtatattgccaacttgcagagcttatagcagctacctgttcagatagccatgaagtagtgtggtcttcaagctctcagatttcctgtcaaaaaattgaagccccattggcaagctgcaggttgccagctgtccaaggatatcatctccaattgaaatcagcaatgcaggctcagagtctttggctcaggtctcccaagcatataattattattctaatgaatttggaaaattacatgttctctaataatagcccatgaaaggaatatacaaatagaaatacagaaagaagtgacttgctgtgggccctttgaagaacttggtgactgagtttgttcagttgtttttagataatagaattagacttagactattgggcctcattgaataaaagggaagtttttcattaaaatatatattctgggcttctgaaacaaaatcataagttcaggcccacattctgtgcagcatcaatccagagcggagtaatggtagttgtttagggaagaggcatgaattctccagttctggtagtttccgtcattctcactttgttttcctaactggccttgtctgtgtagttatctgagtttgcagctcctgctaagctttattttcttgcttggttttcttttaccctccttccaagttcccttcagatggctcacaacataaaatcctgggaagctcttcttcttgctatctgttgaaaattagtgtaagccaatcttgtgtttgatgattattggattattagagagatatcaataactgtctagagttagtagttgaagtctgtaacagaactcctcaaactttaacttggctatgaattgcctggtatcctgttagttacatttgttaattcagtaggtctagagtggccctgctgatggttgcatgcaccatccattgagtagaaaaggtataagtttctgcctctaaaactttgttcccaggttctatcagaagcaggaagcaaaacaaagtttgccattcatacaagtgtttattagcaatagaatttttaaaaggcatacaatctgccttataaactggataaatctcaaatctttgccctcttaattatcctgaccatgtctttgcataaagcaaaagtaacagtgttctggaagtagggattctgttaatctgtttcttttctttcttttttttttttgagaccgagtctcactctatcacccaggctggagttcagtggcacaatctcggctcactgcaagggccgtctcccgggttcaagcgattctcatgtctcagcctcccaagtagctgggattacaggcacccaccaccacacccagctaatttttgtatttttagtagaaatggggtttccccatgttggccaggctggcttcaaactcctgacctcaggtaatccacccgcgtcagcctcccaaagtgctgggattacaggcgtgagcctctgttaatctttgaggattaatccagcaatctcagaatcagttgctagacaaaggacagtttcagaatcaagctttggtaccactgcgaagaatatggactactgagtgccctgcattattttgccttaaacaagtgcagaagggtttctataacatttatcatagttctagccaagccacatattttgaataccagcaattttatcaatgtaaacccaattataaaaacatgctaatgtctaaacttctggggtcaattgtagataaagacagctagatgcttgtagtaactttccttgcagtgtggctctttgattaaactctgtgaacgatttcctataacgtgtatcccaattagggcaaccagcagcacctatttttattatactgtctttgataatatattataaattaaattacacaccacaggacagactcttcacaagaaatggatgcttcaaaccagatttggcccaattctgaggtgggaaggatcggttttacatttgagagagatcaatgtgaaggaggcaggaagaaacagccccttccagtgaggtgtggaattttccactaccaccttctaagcaagacctgagggtcccctcacccaaaacccttctattcttggcacactcgttttttagattaatttctatttgggcccctttcccatcatgtcttcagtacaacattctctcatgtgacttcatgacaaacagaaacagaaaataagtagaagcaaccctagagattgccaaagccagtgggttttccatcttagctttgaagtcctttgttcagacctaatatcaccctgggatgcagacacataatccatataggaaacagaaatgctctggatgaagcagtgggtggatgcagggaaagcaaaaacatagctcttttccacgctcccagtccgttcatctgtttgtgcttgagtgacttccagtggacaccaataacctgatcattcttctgtcacccattttgcagattaggaaactaagtccttgaggggataagtaaattgcctgagtacacatagcgagatgtggcagaacagaaactctctttctgttgtgggtcagactacaggctttaagggaatgaggtgaaggcactcgctcttgtcctgagactgatggctcagtgggataacgactcagactccaagctggttgtccatgcccctaagcctccccatccaattagctcatccttcagttccggataatggctcaactttttcctttccgggttctagatgaaaacctctctctgcagtcctggtatcacctgaaaagcaaaaaataaggattttcttccttctcaataccatctagcacttgaagaaaaactgccagccagccagatggtaagttgtcatggggaagatgacgtggctgctctccacagggagagacttttctgactttcctcaagtgagttacgctctttttagtctgcttcgcagacagcccatttgctaacattgcatcaatatgtgctcatctcatttccctaaaggcttctgtttctctctaggtctccttttccactgcatttttatatcttcctatcctttccagtgccctacaagaattttattcatacaaaagcaggccttcccaaaacacagagttacgtttggtgttatcaaccacactagtggttatgattgaagatacgttctccccatcctaagatggtaaagcgctcaaggagataacttcctgttcatactctttacactgtgggcgtgtcaccctgaggattctgggggctcctttttatccatatctctttccatcttccccctcttttctcctttgttcacaagaccctccctgttgcccctttctccacctacctgccttctaagacaggagttgtaagaaggggtgttcagcctcataaagtactgacattgacagcctggatcctactcaccaccatgccacattatttaccaaaatcacatgggtctacagcctattcccagaatattatgatagtattagattggtgcaaaggtaattgtggttttcaccattaaaagtaatgatcatgagaaaaaaagaaacaagaaaaaagaaatcttaagaggaagaaggaaaagaaggaagaagagaaagaaaagtaagagaactatgcaccagtattactagtaatactaataactgacattgactgaggaactgttttatcctgtactactctgtgtgtgtgtgtgtgtgtgtgtgtgtgtgtgtgtgtgtgtgtgtgtgtattacattaaggcctcatgagtactatattatttccccttattttacaaatgtggaaatctagggacatttaagcccaatgagcaaataggaagccaggattcaatgcctggggaatctgactgcagagtctgagctatatagactgctgaccaaaggtgggctaagtgcccagctttcagggttgggaattattacggtagcgcccatgtttggggattacacatattggtggttccatgattcaaagggccaaggatgtcacaaagccagggattcccatatcaaggacatagtatgggagaggattctgaggtgttaaagacaagtgttttaagtcaacaatccagaggacatgcttttataacaggtgaagtcatggggaaggaaagactgaagcactgctatgtttgtcttcctaagatcattatattgatagttttctagactctcatctctttgaggaggcttaagctaatttttttaaattttactttaagttctgggatacatgtgctgaacgtgtaggtttgttacattggtatacatgtgccattgtggtttgctgcacctatcaacccatcatctaggttttaagctccacatgcattagatatttgtcccaatgctctacctcccctttccccccaccccccaataggccccagtgtgtgatgttcccctccctgtgtcaatgtgttctcattgttcagctcccacttatgagtgagaacatgtggtgtttggttttctgttcctgtgttagtttgctgagaatgatggtttccagctcatccatgtccctgcaaaggacatgattcttttttatggctgcatagtattccatggtgtatatgtgccacattttctttatccagtccatcactcatgggcatttgggttctttttaaaatcactttgtgagttgtggagtttcttccatcttaaatgctgtcttgctattgtgtttcattcacctgttactcacatgtgggttattcactttggagaccatttctgggaagtttcaaatactaacatggcttttacatgccacccctgggctcttgcctcgtttttccattgcctagccataacacaaattaatttctatattcattgcttccaaatggttttctcagatgttctttaagtgaatccctgcttatttttgaattttctacatcccaacccactgctcttttcctccatccctcagaagagagggattgatagatggttatcccactgtgctttaaagcagactctacaagtgcaggaattatgttcatttacaatttgaaggaatgttaatacaacctctccttccttgcaaagtaccctccactttagtttttccttttcaaaactgacagactcttctttggacaacacttaggagccaaacattttggcctttgtcttagatgaaataatcctattaaaacatgaatgagaactgacacttcccatttcagaatgcaaatcatgcttctctgccatcaagaccccgcgtgctccacttcctgctactcttctgacttcctcccctacactttcctcttgtaccctctgccctgactccaccccattttcttgctccatcccttttgtggccagacacacttatgtgccttgggccttttgcacttgccattccctctctctgcctctgcctgaaattctctttccccaaatagctgcctgttcattcttattattctttgctcagatgtcatccatcagaaagcccttctctgccagctcagtttataatagctaaccccaaacattttctattttttaccctgcttatttttttcacatcacagctcagcactttgttatatatttctttacttgtttgttgtctgtcttccccattaaaatgtaagatctataagctatgttcacattttaaacaaaaacaaaacagaaaacaacagcagtagcagccacaacaacatcaacactatcacgtcctcagcacctagaacaacacttggccggtagtagcatttgttttgtttgtttgtttgtttgtttgtttttattattattatactttaagttttagggtacatgtgcacaacatgcaggtttgttacatatgtatacatgtgccatgttggtgtgctgcacccattaactcgtcatttagcattaggtatatctcctaatgctatccctccccactgttgaatgaacaaaggctgagctatggtgagagaggaggctatgcactggtgggaaacgtaccagatctccagaatcacatattacaagtttctggatctaactttgttcctaagatataaattgcttgattgctcgtgggagttctgtttacctgttcagcgccctagttctgcagcaatgactattactgggccttgttttctcttctattcttcagctgccatctttccagagaggttgctcccactcatcctccccaaggaagacattggccaagcagaccttggctctcacatgctaagtgactgcctgaggcatcatcactaaaagtaagggtccagttcttgctttccacttccctaggtgcctgggccaagtctcactcttagcttctcccttgggctcctatgtgcacagagcaagagaattctggcaattaaggggacctgtccatatggggaccaagagactcggcaacatattttgtgtttcattccaaccatagtgccaagtgtagaattaaatttactttcttaagtttggagtctaacatgagcctttgagcagtacctgagacacaaggctacaaacatttccctttctttccacctcagttctgctttgccctgcagctgcctgaattaagtatacatgtcagaaggctttagttggttcctgagaaacttgtgttcaaatcatggctctgacaattattatccatgtttctcagacactggaaggaatccgtcttaggaaataacacttattgaacagttacctagatctgggtcaagcaccttctacactctaactgtcttaatcctcagaattctataaggtagataccgtaattaaccaggttttacacatttttaaaaaattaggccaggcgtggtggctcaggcctgtaatcccagcactttgggaggctgaggcaggaggatcacttgaggtccagagtttgaaaatagcctggccaatatggtgaaaccccatgtctgataaaactacaaaaattagctgggagtggaggtgcgcacctgtaatttcagcttctcaggaggtggaggcacaagaacctcttgaacctgggaggcagaggttgcagtgagccgagatcacatcactgcactccagcctggttgatggaatgagactgtctcaaaaaaaaaattcaagagttagataaacaaggatttgaaccagagccctagctcattaccacttcactgcatcatcactactatgactagttatcatttgtgatatgacatggataccctgatccatgtgcccaggaccacctgctccctttctcaagtacttcagacttgtcctattggtatacctggaaaggctcaaaactgggtacaatctcaggaagagtaggtcttccatttcggagatcctcctttcatagtaggagacagtgtgttataatggacaaaggctttcttggtgactcccactaactgcatgtcttttgagaagtcaatttaacctcctggccactcaactttctcaactataaaagaaaggcttgaaccaaagactcaaaaatattaatgaatgaataatgaataacatttattctccaacatccaatgattctatagccaatatccaacttctaacagttttggtttccatagcctctccaggcttcatttgcagggctctgtgcacattgatccatttcccccagcacagaaatccttattcagaggatctatgatgctttatatcaaccagataatacaaagtagtctggtcacccagctgcctctttgggagaactatgagttcatttcttacaacctgccacaactattgctaataatgatagctaacatttgtcgtaccacatattcttctaatcatcttacatttaattaataacttaatataattaattgttatgattaattaataatttaatcttcacaacaataccatgaagtagttactagtattaatacccatcagtcagctaggcgtggtggcttacgcctgcaatcccagcactctgggaggccgaggcaggtgaatcacgaggtcaggagttcaagaccagccctaccaacatggtgaaactctgtctctactaaaaatacaaaaaattagctgggggtagtggcgggcacctgtaatcccagctactcaggaggctgaggtgggagaatcacttgaacccaggaggcagaggttgcagtgagccgagattgtgccactgcactccagcccgggtgacagagcaagactccatctcaaaaaaaaaaaaaaaaaatacccatctgtcaataaagaaggaatcagcatcctaaattatttgagctcttctcttctgaagtttcacagcagcctaaggcattcaccagggcctctggagtaaacaagggggaagcagggcctgcctaagttcacaatgaaggagaggcagaaaggcctttccctaggttccctgcaagaagatgctgtccagctggtgctcagggctcatgtgtcatttcagcactggcagcagctgttcctcaccagtcctgtataaatctggaaactggagaacattgtcaacctctgtcctgttgcactggtatcttctttccccagtgagatgccttggagactgaaatgtccctgtttggaaatgtcaacaaaagagactgctgctttgatttccttgtccttcttttctgttaacactctggagagtgtgacgcagctgatctcaccttacagaggctaccttgagtggtcattcggagaaagtagaggtactgaaggtggaggaggtggctttctggaagtcagcaaagatgacaaaatgcaccaaatgggagctgccatcagccttgctctttgaccagctctgtcattttataacttgggggtgaattacaggttcgagtgatagagaaggggccatggcatgtcaccatctatttaaagagctgtgaagacactgtcagcaagctttgcctaacgaggatgcagggatgacctgccctttatgtttactccttcaagattgaatgtgtgttgctgctttcctgccagtaaaggcaacagttgcagttacattatttttgcaacaaaagagtcaacatttttcaaaagtgacacaaattcacctttaactttgttcgaggagattgattttttctttctttaaaaaatgttaaaggtttaggtagtttggaagtttttttaattttagcagtttccaactcatgctgaaagagtttgtggatttggtcattccgctaagcagttgcaaatatgcaccttgcttaacaacatagtggttatgctcctcaagagtagcattttacgttttacatttccaagtgtaaaaagataatgataacatattctcttctccccccaaaattcaataagtataattgaatatttaggcaatatcttcagatgctttttattttaatacaaatagcagtaaaatgtttatagtagaaaacagcagttatatctcccactatcaacaacttttggctttcttagttgcttctttcagaatatacctccataattttataatgtatttattcttatattttttatgtattgatttaatagcattgaccacttatacttataggctgggcgcagtggctcacatgtataatcccagcaatttgggaggctgaggtgggtggatcacttgaggccaggaggtcgagaccagcctgggcaacatggggaaccccatctctactaaacataccaaaattagccgggtgtgatggttcatgcctgtaatcccagctactcaggagggtgaggcatgagaatcacttgaatctaggaggtggaagttgccgtgagctgagattgcaccactgcactccagcatgagcaacagagtaaggtctgtctcaaaaaaagaaaaagtagcatagatggcaatgtttggtgaaggaagtcttcctgttaattcacgctgcagtgcctgaacttctttatctgatcgtcttagaaattatcaagaagataattaccctaatttgatcattttatgcatgtatcaaaacatcacactgtaccccataaatatgtacaattattatgtgtcaattaaaaatacaacaacaaaaaaaagaaatcctcaaaacatggcagcaacacctagctctttggctttggtaccttgtctcttgatattctcgatatttttcctagaagttgatgtctacaaacacttaaatggaccagaggaagcttctacccaaaggaatcctccaaaacatctcagtgaagtatggacttcttccgatgtcagaaatagcttcaaaatttagttgctttgttagtattcagtttaataaatctttgatgttcataggaatgtaatcaaagatcttcaagaatttccaaatgtaaaaagataatgataacatattctcttctcccccaaaaattcaataagtataattgaatatttaggcaatatcttcagaagctttttattttagtacagcatagttcactttttaatttgtcccagacttctattttctggataagaaccagtcatcagttgcacagatctattcaatatcttcttaaaaaaatttatccatgcttcttattttttaaaccaactttgatttttatcaaagtaatgcacaaaattgttgaaaaatcaaatagcagtaaaaggtttatagtagaaaatggtggttatatttcacactatcaacaacttttggctctcttaattgtttctttcagaatgtatctccataattttataatgtatttattcttattttttttatgtgttggtttcatagcattgaccacttatactttgttagataaaggttagctttcctcctcacatacactgacacacatactcttatccatataactatcctttaagagtattactgttcacacttctggttaaatagtactgtttgtttatattttatgactataggaatattatactctgctgagcaaaacatcctttcttacagaaatttttgtttttcctagagtttacagtgtcttgattttttcatttgattaatttttttgtgtccagtcactgactctttcctacacctctggcagatctacactattccaccatcaccactaccacctccgtgctgacagtattctccatgtggtcaaatgcatccaatagtttatctttacattgtcattctcaatccagcatcctgaaatggcatccattccaggatattttttaacaaagaaataaaatcattattctcttaagagttgttattcttccgcaacaaaacttcactgcagtgtgcttgctgagttagcaataaagttcactccatatataaatagctcaaaccttgcaggaaaaaatttaaatttgtgcctcagcaaaaagacagatcataacatcaggaacttttaggggttgtgtgactggtaaatatctccaggtttaatatcccaaaccattctaaaggcccactttagatgtggagaagccctgggaagcttatggagggcttgcaatacataacacaccacacacacacacacacacacacacacacacacatacacaaatgcacacattttccctaggtcccaataagtaaagggtagctgggtgcacaaggaagttgttagtttccattatgtatgagagagggaggttcttttttaaaagacaagacacttattatcaatcctaggactgtcagttctgtctccatggctggtaaccttgcctctaggcatctttcctaactgttgttcacctggaatgtgtccttgccaaatgggactacatttgctttctacacccatcttcctctgccaaacaaggatgcagctgcaatcaataacagtctgcttccaacttctgatgtagtgcaagcttccagatgatgagggtcttcaaaattcaagtcccataaagaaaagtgaaagccctagctgagaataaagacttcacgttgctcaaccatcagaaaccctcacctcttctgattccttctctggctgtattccaggattacggatatacctggagccaagggcagctagacagcgtggcagagaaatgcacaaagcagcccatgactatccacagggtgtttaggaagatcaccttgactgctgcttgctagtagcaccttcctattacaatgaatcttgcctatttattctaatgagtattctttcctcttgtaaaaagaaattagtgattttttttttgtagttatcaaagcaggggatgatgggcatggcccagtggtgaggttgaaagcagcattcaagtggacaccagagttgagacagaatctcctggcaaccaggagcttgggaagaagctagaaagagacaatttcactctcccaaatgtccaaaacatagatgtgttttacagaacaaccattataaggagcttcctctctttatgtaaagagcttttcaatcagataattttttttctctgatatgattggttatttagcctcatgttcatgtctctaatatcacattttggtgaaagatatccttttttaaataataattttagctgtcagtcttttcagtggagatgatacattcttacaccatcacattaacaattcagactgagtcaacaacagcttgatggggcacctgattttgcataaagaacacaacacattgaactctctgttccttgcacaggcggaggaatctgttcttttgtttatcaacattaggtcattctgaggtgcagtaccaagggctccattttagtagctcctgagacagcctggaaattaactggtcaattagacatacagcctggatgtacctctaattgacaatgaatactttttgatactatatctgtttaggagattatctacaaattgctttaggcattggatggctccaaatggttatatggacatctgtttttgttggccacgaacatgctattcacaatgacaattttatcattaactgaaatcatggcttcatctactatattattctgaaagtttctaactttcttataatgatcagtggggagtgtgtctatgatatttctgtggtgaaggatttctaaagaaatgtgttcttttattcattcattgaaaagaacatatctgtccttgatgtatatatgtacacttttcctaagaaactcatttaatactgaccctggagtagcatagaggaattgctcttctcatctgcatgcctaggctctggcaatacaaagcttattctagatattctcctgatgaagcatcatgcatttgtttaatactcaaaatagatcccagagagcaccatctgagagacccacactgaagattatgctataaattatctgattattactcctcaaaactgtcaaggtcatcaaaaccgaggaaagtctgagaaactgtcacagtctagaggaggctgtattggtttgttcttgcattgctataaagaaatacctgagactgggtaattgataaagaaaatactttttattggctcacattgccacaagctgtacaggaagcatggctggggaggcctcagggagctttcactcatggtggaaggcaaagccagagcaggcatcttcgtatggccgaagcaagagaaagagagaggaggtgctacacacttttaaacaaccagatctcacgagaactctatcatgggaacagcattagggggatggtgctaaaccattagaaaccacccccatgatataatcacctcccaccaagctccacctccagcactggggattacacttccatatgagatatggtttggatttgtgttcccacccaaatcagatgttaaggagatatgataactcaatgaaatgtaatattctcgatgggatcctgggacataaaaaaagcattaggcaaaaactaaataaattatggaaatttagtgagtaataatatagcaatatttcattaatcgcgataagtgtatcacactaatgtaaaatattaacaataggggaaactgggttcagagtatatgggaactctgtactcttatctttgcaacttttctttaaatctaaaactatgctaattttttaaagtcttgttttaaaaacatttttcaaaaagatgacattgagaaggattttccagtttgcttctgatggggacattggactccaggttaaaatcattgaatccaggtgaaaattattgggctccagttgaaaattatttgttagtctctaatttttgtgcagtagttaagagtacagatctggtcttaaatcattttggacagtttggtaatttctctgaggctctgcctccttatctgtaaaatgggagtaatgatgtcaatctcacagctacctccagagaatcatatgaagtaaggttcaaaaatgctaccacagtgcctacaaataggaagtgttcacagaaatggtagctgttattataaataataataaaggaaatttggattttcctattgttcagctcccagctcccagtagaagatcttaaagaatagcatttcattttcttgccaacagagcttcagggttacaagaagctgaggcatgaggatgtaaggcatggtctgtgttaacaaggatagcaggtgggatctcagtgaagggaggaaagttgttgaatgcagaagcctctgctaaattgaaatgggagaaatggcttagagctgcatatagattaatcacagattattacttggcttaaatttacgggcacatttcagtggcaaattggggtggtgggagcagaaagcagagagaagtggctaaatcaagctgcccttgcctgttcttcatcaggcatgtccttccctgcatggtctactaatcatggcatggctatctacatgcttgtaactatgatgggtcattgattttcacattcagtttgatgcttgccttgtggtttgtgatttgaaaatctattctactcagaaggaagctacaaatgaccatcaaacataacaaatcttgaactctaactacccagaaaacaacagtctcttaaattgatgacctaatagtcaaggacattttgttttctgtttccagagctctgagaaacatcaactgtattaaaggaagagcggacacaccttccatttttctaatcaattgacaaatgtaagttcttcctgcaaacgttttgcctacttcctccaaaagtcttaggagggacaaaattaccttaacatactcattacaaggtgattacttgtttagattagaacactacatatgatgattggcttgttgcacatccaaatggtagattgtatcaatagccatatgaaaatcagttcctgtaagcattatttcaaaggatgggtcaaagccaatgggtatctaacaatctacttctcctcacttttccattgttaactggtagagaggctcagtaattggccacttcaagaaaaggtgtcaccggagttcacaaaacctactcagaaatagcattacattgatcaatcttcagttcaagctcattccagtaaaagcatcacaggaatataagtgacccttacaaataggctaggaagaaaatcagaatatttcccagctaatgaaactgattttaaaatccaccaaaaaatgctgcaaagcaatattcttcctttagagtaaattagagggcagctgattctataagaacacaagcgcagtagtgatacaagatggtgtcaacttctcaattagaatgagttagaaggcttataggtgataatccattttaacaagcatccatcaaaacagaactcaccatctcataaaaagattcccaagctccaactcatgtccaattattttaagtcatcatccattcaagaaaatttcaggacagtgaaagagcctatgatacccactgagggttttttttttttaaattatactttaagtttggggatacatgtgcagaacatgcaggtttgttacataggtatacatgtgtcatggtggtttgctgcacccatcaacccatcatctacattagatatttctcctaatgatatcccttcctacccttccccacccccccggaggccccagtgtgtgacattcccctccctgtgtccatgtgttctcattgttcagctcccacttatgagtgagaacatgcagtgtttggttttctgttcctgtgtcagtttgctgagaatgatggtttccagcttcaactacgtccctgcaaaggacatgaactcaaccctttttatggctgcatagtattccacagggtatttgtgccacattttctttatccagtctatcactgatgagcatttgggttggttccaaatctttgctattatgaatagtgctgcaataaacatacatgttcatgtgtctttaaaacagaatgatttatattcctttgggtatatacctagtaatgggattgctgggtaaatggtatttctggttctagatccttgaggaatcaccacactgtcttccacaatggttgaactaatttacactctcaccaacagtgtaaaggcattcctatttctccacatcctctccagcatctgttgttttctgactttttaatgatagccattctaacttgtgtgagatggtatctcattgtggttttgatttgcatttctctaatgaccagtgatggtgagctttttttcatatgtttgttggccacgtaaatgtcttctttgaaaatctgtctgttcatatccttcatccacattttgatggggctgtttgtttttttcttgtaaattagtttcagttctttgcagattctggatattagccctttgtcagatggatagattgcaaaaattttcttacattctataggttgcctgttcacactgatgctagtttcttttgctgtgcagaagctctttagtttaattagatcccatttgtccattttggcttttgttgccattgcttttggtgttttagccatgaagtctttgcccatgcctatgttctaaatggtattgcctaggttttcttctagggtttttatggttttaggtcttatgtttaagtctttaatccattttgacttaatttttgtataaggagttaaggaaggggtccagtttcagttttctgcatatggctagctagttttcccagcaccatttattaaatagggaatcctttccccattgcttgtttttgtcaggtttgtccaagatcagatggttgtagatgtgtggtgttataaccccatcacctcagccccaaatctccttaagctgataagcaactttagcaaagtctgagggtacaaaatcaatgtgcagaaatcacaagcattcctatacactaataatagacaaagagagccaaatcgtgagtgaactcccattcacaattacttcaaagaaaataaaatacctagaaatacaacttacaaaggatgtgaagtacctcttcaaggagaattacaaaccacagctcaaggaaaaaaagaggacacaaacaaatggaaaaacattccatgatcatggataggaagaatcaatatcgtgaaaatggccatactgcccaaagtaatttatagattcaatgctatccccatcaagctaccattgactttcttcacagaattagaaaaaactattttaaatttcatatgtaaccaaaaaagagcctatatagccaagacaatcctacgcaaaaagaacaaagctggaggcatcacactgcctcacttcaaactatactgcaaggctacagtaaccaaaacagcatgacactggtaccaaaacagatatatagacaaatggaacagaacagaggcctcatggggtgttttatcaaagactacaaaatgaaaagaggagttgatttgaacaacgaagattttcaaacatatttcagaaacataggtattacatgaagtgaaatatacctcgtgaagttgctgcttagaaggggatgaccttctctttcccctgaactctttctaggttgccttctctcattgctttgagaaaggaatcagatggggaaacgagtaataactgccaagttgttctcaataagttctagcctcacagttccttacagcctgggtactatggcaatattctttacctctctgtagctcagtttgttcatccttaaaatgggcagcataagtagtacgtaacctaactcttgaattctaactacctagaaaacagcctcttaaactgatgacctgatagtcaaggggtatgggttttagtgtggattctatgagttaatgtatgcaaagtcattcaatgagcacttgctatcattgttattacaattgttgctcaagctggaaaagaggtgatgatgacaaaaaaaagaaagcattatttaggtagtgagatattggggatgatggagagtttcctccaaaatatcagcttcactcaatggcaacagtagacactccaggcttaggcctggcagtatagcattccctagtcttctaaagccaacaattgattcagtgatagacacttaacttaagttactcccatgaagtgccaatttaaaagggcagaggcttcacctgctttgctctttgctctgtttcctgccacccatttgaagaatgttcaatgaatttgggacttaagaaaaaaaattccctttccactgggcttgcccaactaatagaacaaaagccttgagctactgacagccatttattttactcttatgaaaggagcgcctgtttgagaatgaagccaaaccagaggacaaaagagccaagagaaaaaagttaggttcctgaagatgtttgagcacctggttacagctgtgcctgaaggaaacatactcttgatcctactaggtaagggagaaataaaatcaatctcttcctctctgtgttgttgttttttattgttattgttgttctttttaaatccatttgagtagggtttctgtaacttgtgactcacagagtcttgactttactgtccctatgcttgggtttactcaaacaactataggttagattaaatcgagaagcagaggacacaatcccaaggaagatggagataggataggatatagaagagacaagtgagattccccagagccctgctttagatggagtcaagagactccaccttttcctgtcctaacagaaacctcaagcagggggcggggggaatctcactccctattgtttctaccacagttcttgtggtcaggatgctttctagataatctgatcctactgggactatagaggattggagaaagaagaacccagagctcccaagtttacctggtctggaagtcttcacacattaaaattttcatttaatttcctgaaaagttgatattttggaaacacacatttgtttcatagttacacccttgtgaaaagcttttaatttaattaatttattttttaactaagcttctccttttgaactaccctcagccacttccactttagtgggaggaaaacctctcagtccaaatcactgaagataaggacagcatcttgtttgtgttttaattcctgttcggcagagtaccaggaagcatgcaagagcctcctttaatcaattcctgccgtggccaagccagacatatttcatcttctggttggaccctcagggctgaatttgcaaagaatgcattctaagccattaagccaataaatgaacctatattcaaaaaagactgtttaagtagttagtttagttacttataggggatttaaaggtataaaatcactggcttaggaatggacaggctgcagatcagagcttatctcccacttggctgagctgtcatggaggaagctggcagccactcagaacagacagtcacccgaccagtcgctgtcaccatttgcaactagaggcacacacacaaaaagatgaccatatggcacctgcctcaacaacaactgtatctaagtagacactgaagttgtatgtcctttagctgtcatgaagttgaatttcaacagaaagtgagtggtagttaaacaatttctgccagaaagattaaaattgaaaggcttaatttcatccctatcttgtataaacagtacaaatgtcttctctttatcacggtcaaatcttcccaactctacattaattatgatccaattaacaaatggaacatgatagcctatcttctcccttgcagtttgtaagaaaaatcaggatttcttaacttggctttctcttggctcacattgtacatctgtctcctaaagatcttgggtaaatttaagcttttattcataaatttactcccatacaaaagtcatgtttaatgagcatgtttctcacacagttgcaatccatattaatgtatacctctctttaatgttttccaaaatgtgatccatagaaaactagtcttacaggtcccccccatccaaaaaaagaggatactccatggtaaaataagtttgggaaacatcagatcatcagatgtcacattctccagtctgagattcacaatgcatgacactgcatgcaaaagactctgagaagttatgtagaaaacaaaacattttcttccagggtttttatagtttggagttttacatttaggtttttaatccatcttgagttaatttttgtatgaagtgtaaggaaagggtctagtttcaattttctgcatatggctaaccagttctcccagcatcatttattaaataggcaatcctttcctcattgcttgtttttgtcaggtttgtttaagatcagatgattgtagatgtgcggttcttatttctgagttctctatgcaacaaagttgcacatcctacacatgtaccccagaacttaaaattaaaattaaaattaaaaaaataaatttacatatccctaattactaaaaaataaaagaaagaaagaaattgtggtagatataccatggaatattattcagccataaaaaagaaatgaaataataacatttgtaggaacctggatggaattggagactattattccaagtgaagtaactgaggaatggaaaaccaaacactggatgctgtcactcataagtggaagctaagctatgaggatgcaaaggtgtaagaataatataatggactttgggaactcacgggtaagggcggaagtggggtgaaggataaaagactacgaatttggtacagtgtatactgcttgggtgatgggtgcactaaaatctcataagtcaccactgaagaacgtattcatataaaaaaacaccacgtgttcccccaaaaacctatggaaataaaacatttttaaaatgaaaacaaaacaaaacaaaaaacctgtttaactgtctttcatccagtatttaaagaatcaatttgtctaatggagaaaccccatctctactaaaaatacaaaattagtcaggggtggtggcacatgcctataatccgagctactcgcgaggctgaggcaggagaatcacttgaacgcaggaggcggaggttgcggtgagccgagatcgtgccattgctctccagcctgggcaacaagagtgaaactctgtctcaaaaaaaaaaaaaaaaaaaaaaagaaaagaaaagaaaggaaacttttcttcatagacctctgttaacagtctacaaagccagcagcttggggaactaagtgtggatctagcttcagagacaaacactagaccttcatttatgtccagagctgaggaaagacaatttttagtatgtattaatggtgtgtgtatgtgtgtttatgcttaagataatattctatttgtttaattaattcccttggctttactcagaagtgtttcgggatgggaaaatgacaggtcatcacggttttctggtctgaagtccaggattttgctaagatattttaaatgcacatcttgattagacaatattttaatagtggtgaaaatgcaaatagtaatagagttcatgaaagttcatatcattgattttattctgtcacctagacagaatctggggtgggcttcctggaagcctaagtctaagtctaactttaacttaagtgctccctacctcccagccaaactagcacctcctccatccccatttgctatcctccttagtctgtgatcctggctttgacagagaggcaagcaggcaataggccaaagctgggaaggcaggaaaacctgtactgaaggacaagtggaaacaacttgggaggggtggaattaaagctcctatgctgctctccacatgcttcccagtctcaagtacctcacccaggagagtcattaaatcacttaattaaattactcaattaaaggggccaagcaatacctctgaggggaaaatactacatttggattcttaagatatttctgatgctaaaaactttaaatgttttatatgtgttttatacatagatatacatatgtaaaattacttatattctaaaaagatgcctgtgccattgaatgaggatgttagcaccctcatttgaccaatgagatcacaaagtttgcacaatgagtcaattaccccaggttacaaaaagaatcaccaggaagagtgggcctcccaattatttcttcttacccagtatattgaattctgttgtcacatgagaattaaagatgtacacttggcttgtgaccacattcttatttgctagtatatgaaatattgttagatgtatatcttctttaaatatgtcctccttttctcttgctcctcatcccccatctcaaactgtcaagtgattgtgtatttctgaaataattaatgtccatagagtacctgaaattctaaggacattttatgtaacagcaaaataaataaataaaaaccaccatataaagcagaagaaattcaatctacttgttttgtctacaaatgtcaaacaaccaaacacctggtttgattgattttttaaattgtgctgattgagttgactggtggttgtcatgtagcaaacatgcaacttaatccttccttttcctaaaagtggctttgtgttcagcatcaaaccccattatcactgattattaagatgtccacattatgaaatattttagttggaaataagtcacttcattgtattaagtggcaactatgtgttcattaggcagctttttgtttgttttttagtagagcctctacatagcattgtgaaaaagagcaaagtcaaacagacatggcctgcatcttaagaattctagaaaggaggatgaaccttatgtgcaactgtcattaacagcagaagtaaggaccaagaaacagggcttcatggagatgtggcatttgtcttgagtttggaaatataataaggggccaggcacagtggctcatgcctgtaatcccaacactttgggaggccaaggtaggtggatcacttgaggttaggagttcaagaccagcatggccaacatgatgaaaccctgtctctactaaaaatacaaaaactagccaagagtgttggtgggtgcctgtaatctcagctatttgggaggctaaggcaagagaattgcttgaacctgagaggcagaggttgcagtgagctgagatcacaccgctgcactccagcctgggcgacagagcaagactccatcaaaaaaaaaaaaaaaaaaaaaaaaaaaaaagaagcaaagaaagaaaagaaatatagaacgaatttgaacaaatccaaaaggaaggaaagagtataagcaaaattacagaggcagcaacatcactgtctgttttggtatggccaaggtgtgatagctgagggtgggcactttggagagttagcttatggccagctcacagtggacttagatgcttggctacaaagacagaacctcacaaggtgtgcacagagggtttgttatctcacagccctctcagagggatagagcagagtggccaagagcaggggctcaaaccctagcccccttgcttcctgggaagattatttaatccctcccaagcttaagttgcctcatctgaaaaatgaagaaaatagctctttcctcctgggtctgatgcaagttaggtaagtgtattcatttatgcacaagtgtttattgagcacctattattttccaggcactcttccaagaattgacaatacagctgtgatgaaaaaaggcaaacttcttaggggggttacattctaatggaggagacagatgggacactagataaattaagcttcatgatcatgatgagtgctatgaagaaaaaataaaccaggaaaggaagattgaaagcaacaggttgatattggccagagaagacctcactgagaaagtgacttgtgagtaaagacttttgggtgtgtaatgataaatatctgttgtcaaaacattccaggcaaaggaagaaacacatgcaaaggtcctggggcaggagtgtggctggagcagagtaagaggtaagtccatataagttacagtgggttggggctagggctggtgagagatgaaggtcatgtaggtcctttgacgttcagaataaggacttcgcctgttactttcagtgatacaggcagctattgaagctcttcaggaaaagggtgacgtgatttttactttaacaggatccttcaggctgttcaatgatgcatataacgtgcttagcacgggctggggatatggtatggcctcaataaatgttagctattatccttgtgtttttttagtgttggcatgacagggtctgggggataccaggatgtctaatactatctaggatccgcaggatactggagtctgttcgaaccctcttcccagtcctattttagaagtaagacttgcatgactgtgacaaatgggctgctcacttccatgaagggatcagacagatctggctgttggctatgcttttcttgtgataatgtgccctgcaattgctaggtgaggtgattgcacgtgtacatatcaggctattgttaagctgccctgcgcagacgtggttaaagtgtgaaggcaggaattggccaggaaaacagttttctggaagtgccagaagcttctggatgctgcactgggttattcccaagccagctgatgacatcctgtcattgcaaacagccccacagtactgaaagccccagagttacctgggggttgggaagtggaagcttctagtgtgtgttaaagacctatttgttcctcccttgttctcaggaactaatgatcatatagtcagtataaaataatagtaactataacataggtaagggtacgctccatccactgagagtcactttcaaacacagccagttaagcataaattgataaaaacttttatgaaaggtaatttgggtaatagttatcaaaattcttcataaaacccatacccatttacctagtaattccacatgtggacaaaaatatagttgtgaagtgatagatgcatgtaaaaaagtaacttaaaatatatactctggttctcaactacttaagacataggggctggattttgtgtctttctttcttccttcctttctttctttttttggagacagaattttgcccttgtcacccaggctggagtgcagtggttccatctcagctcattgcaacctccacctcccgggttcaagagattctcctgcctcagcctctggagtagctgagattacagacacctgccaccaggcctggataattttgtatttttagtagagatggggtttcaccatattggccaagctggttttgaactcctggcctcaagcaatccacctgtcttggcctcccaaagtgctaggattacaggcgtgagccaccacacccagccaattttgtgtttttcaaggtcacttcgatacttacccatcacaattgtagaattcagtgtagtgtagtcacgtagccaataagtggcatgggcaggaagcagaagttctctgtggtggggtcactagagaagatataattgtcataaagactctcagctgagccttgcaaactggatgcacgacctttcaaacactgactcttctttcactggctcacaaggccctgcctgtgtttttcaggcaacccacatctgtctcctctctttccacaattaaaattactgggtcatatttggaaaaattatgtttcagggaatgaaggccttttccctatgctatttttttttcaaaatgtgttctgcacaaggtgaatagtgtcaaagtcaaaataatatgtggagataaatctctatattaaacatcttatttggtaatcacggaattgcaattcaaggcgtaaacagggttggtctaggctaagtccaaagaacaaagagaaggttggcatttttgttagaaagagaaacattacatattgttttgaaacaaaactcattggcacagtaaacaaagcttttgggagctaacaagctctgattggtgagggatagtggtagataaaactagtctttgagtcacagcaggtcgacgcagcagttaccaggtaaatctggttttagggttatagaagttgggcttgtggaaaaatgtttggagctggtgctatgtgctccagctgctttttccccagcccttcaagtatgatttagttaggtatgacaaaaatgacccaaattgtgtaattaactttataaccacaataggtattaacagatatgagtaggtgctatttgaaagtatcccacaattaattacttgaggtgatgtggctgaagttattcgagcatcctggctgaagagcttctcagaacgcttattatataccaagaaactccaagagtgaggcattgtggtcaaaagaacactccaggtttatttgactatggaggttgtttgttttgcacctcttaacattctgcaagccaaatgtcttgaagaatacaactttggaaacttctagattggccagaatattgggccttgccaaggtaggaaaaaaaaaaaaattctccagagcagactttgttaccataacttcaggaatgtgacttctagttggtgcccttctcatcagctccagtcagaaaacacccatcagtcaaagaacccaaacttaaaaaaaaaagcacatggtggtataaggaaccaacaaatataaagagccatcacattcaagatcttaagccccttcaataaacaatgcatatgcagttgccagaaaatttacatgtttagatgacaagacttcagtgctagctgtcagtcaagagaagcctggggaattctcaagagggttttaaaaaaaaaatacccaggcagatgtgcatctggaaggcaatcccacattccattctcagcctgaacgttgccttcaggcaaaagaccgcatatctaagaggatggcaagattcaccttgtgttgtcaacagtgaatatgtcaatcacactcagagaaggcttgacagactgtgattcacatttgcatcaagttcaggatagctgtctacagctgtctttggattggtggcaatctcaggacccaaagaggagtctctccagatcacggagtcacttcctcttcactgatgtcttgaagatggtgtgttgggcaacctccacatggggaccttgggactggttgtctattcccacatcacagcatcacactgtgggatatggtaccccaacatgacaagacaaaataaaaataacataggccagcccagtcagccccttcttcaactttaagtaagcaaagctgagcagacaagctctgcctgctggcacactgtcagatctcttcagagtgagtacccataagccttactgcttagccaaggccagttgagaggatttgaatttacagctagagtgacagcagttttctaagtaaaatgcaagcttacatcaggaagtgtgagcctaggaagactgtcaagccttccagagagttggaaagacatgttctggaagccaaatgtttggattcgaatctttgctgcatcacccgtgaccattgtccatttaagtgtgtttaatttacctctttgtgcctcagttgcctcaactgaaagtaaaaataataaaggtccctaaccctcattctagtttctgtgaatattaaattagattactatataaatagataaatagatttggggtaagtaccaggtacctaatacatgctcaatacattattaggttttattataattcacttgctttattaatagcaggcttaggtcaatagagagtatgtatatatttctcttatttgaaagtctgtaaagtcaaaacactgggtactttctccaaagctgagaaattccatttttgagcaagagtcaaatggaggatgcttgcatttttcctttcaaatattttctgtacctctgtttcttcctcttaccccaggtgtactcttggaaaaaaaaatatggttctctgtggacaaaacaactatactcagatatacctttttgtgtccaaaatgtgtttcataaaccatacagaatagataagaaaggattataagtatggagggctttatgctcttgctgcttctggcctgactggattctttgatttctgtcagccttttttaaggagtcattgtaaggctgtcatgggcatctcaggtaaagtatgtgctttggtttggtaagggtttacttgggaaactatttctaggaaactagtttattccatcccaaaaaataaccccaccctgttaagataaatgagtacagcaaacagaagttacccaaggacttggtcgccagggcatgggtttagctgtgaagccagtgatatatgtcttgcccttgggggacaaatgaccactgaagagacagtctttgtgccaagaaggacctcagagaaggttggaaaataagctgtgtcatagggatcaagcctagaatcacaaaacagtccagaaggaaatgaggaggcaaatggaatcaaaggcagcaaagcaaagctgaaccaagaaggcaacacacagggcgcataggggctggagagggacaaaggctggggaaggccaatgacaggagggataagaaagcacacaggtaaaaggaaagcgaatgcctgaagacaggcaattaggagagcaaaatctgcgtactggataaacccagaaggagataagaagtatccttcttatacatgtggagaaaaaagaagagaaaagaaactcaagatcaagaagtcacaggaacaaggctaagaccctgacttggtgagaagggattggcaggctgctggtaactggtcataatggttaatttaactatttagcaatctgggaaatatgtaatttataggaggaaatacattatttgcaaatagtttttattttatttttacatttttcagtctcttgtggacacttccagttcaaggaactgagataggacaaatgagcatgggcccttcctacatggagcctgaaaggctatcgcccacaagaggccaactggactttctctgcacctctggttccctagaaggaagaaggagaggctggacagggactcagaagcaggtgggtataccttcgtgtctagtattatttgggtttcacaggaaggttagctgttttatctccattttaggaaactgaggctagtagaggttaactaaagagtctcaggatatagaagattcagagaaaaccaaactagaattcagagctcaatccttttgtaagaagccaatattcaaacgagtgcaaaatttaacagccaatttcacacacactttgggattgggaaaggaaaagaataccagtgaataccaagtctgaataaggctctaataatgcttttggcatctcccctgttccactggagagccattatgtaacgggaaactttgtgcaagcataatttgatactaataacaatagctacaatttactgagaactttctttaggccaggcatcgttctaagcacttaatataaattaattcacttgacactcacaacaatgctgtgaagtaggtgctattgttgtcttcattttatagatgaagatactgaggcatagagaggttatataacatgcctgaggtcacacagcagtcaaaatcagggccaggcttggtactcagacagtctgactgcagagtttgtgatcttaaccattatgttctcctgtgagttatataaataacattgcatctttgggcaagatctgaaaactctactaaatctgttcctttcgcattcataacccaagtctctagattagaaatttttgcattcagagattcatgtgccatgtaaccaagcctcatccatgcctcaaaaaagacactgaggccgggcgcggtggctcacacctgtaatcccagcactttgggaggccgaggtgggcggatcacgaggtcaggagatcgagaccatcccggctaaaacggtgaaaccttgtctctactaaaaatacaaaaaattagccgggcgtggtggcgggcgcctgtagtcccagctacttgggaggctgaggcaggagaatggcgtgaacccgggaggcggagcttgcagtgagccgagatcccgccactgcactccagcctggtcgacagagcgagactccgtctcaaaaaaaaaaaaaaaaaaaaaaaaaaagacactgagctgcaaagatggagccctctgtctctgtattcttatggtctaaccaaatacttggcataaaacacatgcccattatgcatttggtaaatggatgaaacaggtactggccagcttgcaccaccaacaacactcatttataaaggaagaaccctaattctgcacacagcatagtgaattgtaagaattgtaattagctgtctaaacatctgtctctcccactaggcccacaggctctatgagcacagggactgtgctttatttttctttatatcccaaatgaaagtcaacatgcctggggcatagcagtactcagtaattttttggtgaataggtaaattcagtttatagaacctcatatctatatgcagagaaagctgaattcagtgccaccagttatcaaatgagtgttgcttggattgccaggactctactgtggtctcattctgactgtaggaagggatttattgggtcaagtcagccaatgcccattgaaatgacaaaaggcatcattttctgagcactgagcaatgcatgtggcataggaggggagggggtgacaaaagctgctgaggtggggactatgtactgggaggagagggaagtttagatttcagtgaaattaccaagtgctagtcataggcacatctctgccctgggcaaaggtatgcaactcagaatgttccctgaatgtgctgagaaatgccaaaaattaaagttggaaagaaatagtgcatccatccgtagaaggccattaaggcagatgtggtaggtgatcaggagccttggttaagagggggagtaatgaagggaagcagcagaatttcaggaaaaggatacaggttcttattgaatgagaagagattaaagtagggacccttgtgtataaaggtctggaatagaacagaatcttttttactggtggactatctggcagcatggctagataaaaggaagacagttttgaacaaagaagggccttctcagtgccacaaatcacaccttcctactagtaatgccaaccctaatatacaacctgagatcttaaaaacagctttgcctatttctcataaacacagcagggctccctgaaccaccaatgattctcattgtttcttgttcagtttcctgggggaattccagtttagcctcttcccacaagtctcacagctatgaaattagatatggattatcctaaaggtattcctaaaagtattggtattctgagaaaagtggtgcaatggtcaaataagattgggaatcagagtgtccctgaaaagagctctggatagggaatcaggaaaccagtgctctagtcctgacatagtttgcctgtgtccccacccaaatctcatctcaaattgtaatccccataatccccacgtactgagggtgggatctggtgggaggtgattggatcatgggggcgccttcccccatgctgttctcgatatggagtgagttcttatgagatctgatggttttataaggggcttgtccccctttgctcattcactctttctcacctgccaccatgtaagacatgcctttgcttctctctcaccttttgccatgattgtaagtttcctgaggcctccccagccacgtggaactgtgagccaattaaacttcttttctttataaattacccagtcttaggtacgtcttcacagcagtgtgaaaacggactaatacaagtccctggcttgcaacttctttgccttatgacattgaaaagtcactttatctcttttaattctaagtgttttgaaatctgaaatgcataaacatcaatctctaatcaaataaaatagtgtgtttgaatcctttggaaatatataatggagtaaaaccacataaagaatgtagtgaggccaggcaaagtggctcgtgactgtaatcccagcactttgggaggtcgaggcaggcagatcacttgaggtcaggagttcgataccagcttggccaatatggtgaaaccccatctctactaaaaatacaaaaattagccaggcgtgtaggctggtgcctgtaatcccagctacttgggaggctgaggcaggagaattgcttgaacctgggcagcagagcttgcagtgagccaagatggcgccactgcactccagcctggatgacagagtaagactccatctcaaacaaataaaaatagaatgtaataagaatttgttattaaacttcaaatgcttatccattgctatggatcaaatttgtccccacccccaaattcatatgttaaagtcctagctcactgtgactgtatttgcagatagggcttttaggaagttaattaggaggttaaataaagtcataagggagaagtcctaacctgatggggtggtagccttagaaggagagagagaagtctagctatgtttacacatgtgcacatgcgcgcatgctcatgtgcgcgtacccccgccccccccccaacacacacacacacacacacacacacaccagggaaacgctgggtgagcacacagtgagaaagtgaatgtctggaagccaggaatagagtgttcaccagaccctgaccatgctggcaccctgatcttggacttccagcctctggcactgtgagaaaataaatttctgttctttaagccacccagtctatggcattttgttatggtagcctgaacaggctaagacattcatatatgttaatattattattcatgcttctatttatatttttatacttcatatgaggcattcagaaagaaaagctggcataaacatgagacagaacccactcttgtcagaaaaatcctctgtggaagcaaaactggatttttgagactcgggaagataaaacacctagaagtttttttttaaaaaaacaaggccctctgtgacacaggtgaccttgtacagaactcagtgcaggatttctaagatgcaaaatgaggcttgaaagaaggcaagtgatgtcaggaagaaacaaaaatgtcaggctatggagtttagtgaacaatttttttatgtaagggccagttcaagaaaaatatactttatattgtatatatgataagcattatattttttcactcaaagtgcaaatgactctattaaactcacatcaaaaagttatattcctatacctgagatttttcttttactgtgtagggaattaaaagtaagaatattagtcaccccatttaactcaggctaggagctctggaatcatgaagaggtggcttaaaatgatagcttgcattttccttttcttcattctcccttaaaattttaggttaacttcatctccagcaatctataatagcacaaggcatctacggttttcatggcctttatcgctggtaaagattctggggaaggcttttaacttctctgtgggtagctgactccatagcttaagaggaggcatgagatattgctttggaggtcattacccacctcctcccaccctctttcttaatccatgatattaactcattggttcattcactgattcactttttcagccaatattcacttgtactagtgccacggaatttcgtggagcctacagaatagagaagaagacagacaataaacagtgagttatataattcattttgtttaaatacatttatgataatggctagaaaagaattatcaagtactctgagagtgtaaaatagggtatcctaatttagcccaggatggatcaggaaagtattttctgacaacttggtattatagctggaatctgagaaggtggtaagaagggaaggacaaggaagaaggacatgcctgggaaagggcccgtacgtatgtgggaagggacaaggagaatgtggggagccagaaaagaccaacatgatcagagtatagaaaacaatggggtgctcagcacaggaaaagaggggtacaggaggcagagaccaggtaacttaaaatcttgcaagctttggtgagaaaggtacactttttaaaagcaaaggaacaccactgagtggttttaagctgggaatacaatggccatgtggtcacatatctcagcttcctgtagcatctcctgtcatccctgggctttgctctgcaaagcaacacaatcctggttagaggaaaatggaaagtgctgtctggtatttgatgatgtcatgcactcgcctggacaattagtgggttttctttttgtccttttctgaacacagttaaatatgtaaaggcagcacactggacagctatcaactctgagcagaaaagagtaattagttaatggcggtgaagtgttttgtggatggaaagttaaatgggaaatattattaaaatgaccatgcataggcagtggcagttgatgaaacctcagggcaagctttccctctggggtgttttcccacatcagggcagctggtcctgctgccatagataagcacagaccattctagggggaagagaaaatctacagcgtgagcaaggcttcatttgcttcactttaatctcagataaatgttgtcccatggagaacagtcagagtgggcagtcatttcagtttaatacaaagtcatcagacattgggtaactgatctgccttcctaatgtagtcatctcctagggagcagggggtaccagcaaattctgcagccaccaccaactgtgtgaacttaggcaagtggccttaactaattttaattaattggccttaattaattaagccaagccttagattgctcaaaaacagatttgtctatttatttattcgtgtagctgttcatgcaagtgttcattaaataatttgaaaaccacttgctgaacgccagactagacctggagacataatggtaagcaaacccggattcctcaagagagaaagatacacaaatagtgggttaaggatactgaattggtaacagcagtaaaataaaataaaatagttacagactcaaaggaagtttcaaaaataatacagagaaattggtgtaccctttcctcagcatctcccaatgggaatatcttacataactatggtgaaatatcaaagccaggacactgatgttagtaccatctacagaacttgctcagactgtaccagtttttacatacttgcctggatatgtgtgtgtgcttctgtattgttttgtcacatgtataggtttgtgtaaccacaaccaaaatcaagataaaaaatcattccatcaccacaaaggaactttcttatactctttagaataatatatcttttaaaaaatatacgtgcatatacgtgaaacagatgttaatgacactcaggagaaaaattaaagtttttgccctcaaggagttcacaattatttgagtaattgggtactttttaactttgaattattatattggaatgtcaataataaagttgacattcctgggcctcagctgaggccacgacgagaaagaagagagctagtgttttgaagacctactgtgtcctaggcaccttgttaggaactttaccctgttaactcatgttcatctgacagatctcttccacctctgtggttctgcccattgctgaacccgtgaactggctcggccagttcttagtgtgggatagtttcttctctaggcaatcaggttcttagagaaggtcatgaaaaagtcagagagtagggatggagcactggattcattagccagaggagcaagttcctggtctcactcctatgtaccactagatcataaattccttcctggcagggaccattccatagacatatttatatcctcaatgaccaataaacacagtgtctgccatttgagggatacccagtttaggtttgctgctctctcttaccctggcttacctctcttaccctcagctagagcagtggagtcagtccttcacattgagacgaagatagaggatcatatgagatggggtgatataggaatgaactttgctatcaatctgcttttttccagacacagcaaagagcctgttacattacctcattgaattttacatgaagccttaatgcatatattattattcctattttattgatagtgactcagagaggttaagtaaattgccaaaacctatgtatctactgagcagtttagccttatttgagctcagatctctggcagcacagtcctgctcttctacagggaggcaattccagaagaagaacacttcctgcccagcaccagcttattgtccaatgcctaaaactctacccctgtcactcaattccttttggttcacgctatgaaaaagcacagtgagactcaatgcactttgtctttatccatcatttataccccagtgggaaataagttataagcttctttcctaaaaacagctggagagcaggtatgaaaagtggaaaataactgaaggatagatcaaagaggagcaaccaggataccaaagacaaattctgactgtgtcagagggtggccactctataaaatcagttcaggaaggactgacacagaagtactgattcctctcacataggtctaatctagctttgaaggttcatcatgaatcattcagcgataaattgtcctttaacctggaacttttatgcacaattgggtatggtaaattgattgcaaaaatggctctacttctccactccttcttgaatttgtgccccttatatgtaatttttttttctttgatggcgtcttgctctgtcaccaaggccggagtgcaatggcacgatcttagctcactgcatcctcggcctcccaggttcaaaagattcttctgcctcagcctcccaagtagctgggactacaggcatgaacaaccacgcctggctaatttttgtatttttagtagagacagggtttcgccatattggccaggctggtctccaactcctgacttcaagtgattcgcccgcctcagcctcccaaagtgctgggattataggcgtgagacactgcacctggcctatatgtgattttgaagctcttcctacaaccttgaacctaggttgcccttgtggtttgcttcagctgacagaatgcagggaaagtgaagccctatcaggtccaagcctaggcctcaacaggccttggatgctcttagagcccgacctcactatgtgaacaatcctacattagtttgctggaggatgagaggccatatgaaacaaagccaaagtatctcggccaaggccatcatagacatccaggccccagctgatctgacagctgaccacaaacacatgagtgagcctagatgaggtcagctagacctgacccagattagcaacagcacctcaccaacccatagatgcatgagcaaaatttagtgtttattaatatatgctactgaggtttgtggttgtttttatacagcattattgtggcaatggataacggatatagcaagaatcttaatcccttccctatcttgggaatttctttttctctgcctagctacaatggatctagagctttttctgagttatgctagatttctgctttgtgagagcaagcagcaccctgtagtagaaagacagtgatgtgttttgctcctgtgtacaatacagcccacaaatctcttgcaggctgctctctggcaaggctggaggcaggctgctagcatcatccttcagcatgaaagaagttaaattgaacactagctcctgggcccaaccacttcccatccaatccccagcatgagtaagagctgactagggaatttcgggcactaggtttccagtttcacagaccagagccacaatatttccacacgcagatatttgttacaaatatttataggtgggggagataatctctcagtgcagcctgaattgtgatattctctaccgtcagtagatgtcatgtaactccatagtttctctgaccctgatggattttttttgtaagaatgtgcttcaaacagtattgatcttcctaaattccttttcaaaggctgaaatgttctccaacagacaaggaaagaatgcattattatgatctattaacaagcatttcaccaattaattcttatttatactttatggctaaatctagcaaatcaactagccctgtgtaccctagtaactgattcaaaacacaaagccatcaataacttcgatgactacttgctttcattacccattcttacaataatacaataaaaagctttcatttctaggcaagccacaaatacaactcaacaactcaatactgccattgctgcatatcagctgactcaagctcgtccttaaccaatcaatataaagactgagctctcttcctccagtggaaaacagaagccaaggacccagaatcagcaaatcagtctgggcttggataaacctaagaagggttatttgtatgctgtctcttaaatgaattagcatttcccctactcaaagtctgcctacttaagggctcaaattgcttcacataagctattcttaacaaaaaatgcaggttaatgcaataatattctggggcttgtaggcacctataaaaagtagataaattatggaaatctagatccagctgacattttacatcaaactacacacattgtatatactcaaaagcttctagaactgagtacccctccattcactgtctgcattcttattttttagaaacagtagttgcaataagccaactttaacaattaaactaaaaaaaattatttcagtagagttatatctactgaactggttaggttctgattaggttaggttcagattgagaaaacagctatttcgcatctcccattttctactgcattcagagaatgtattcactgagttgacgtaggacaaaagagctcactccatttaaatggttaattttttttctttctgagtgcatatcatttaattggcaattgctaaaacatacacagtgaaacaccattggtgctgtaattatttccctcgctaggtcgtaagccctttaaggtcaggaaccaggtcttcatgtttcattgctgtctacacagtgcctagaagggcaatgtctggtacataataggcatgcaaaacatatttgctgaataaatgcataaactaatgcatcaacaaactaattgacacaccaaagaccacggtcataacacttactcttctcaggcagcatttaaggctctccaaaattatggaagctttttctggaccactcagcctatagagacctattttgttataatagaactagtggcaccttgcccagatccctttataaggctggtgcgctcatcctccagctttagtaagtgttaacttctaagggcacatggctgtacctttctcttgaaaattgccctagctcccaggagctacctcacctgtggatgtctggaaggttacataacccctccttgtgggtagccaatagccaatgacgtaatgatccaaacatacgaaagtctggaccccttggctcaaagtggagcaattctgtgttgtcagtgaccagagctccctgtgtgaacaggagtagactagatttcagctaatgttgtctttgcttaatttcttcccccatcatatcctgcatcctcacttctttaaaggtttctcctgagagcactttcttaataaattaattgcacaggagtccccatcgtcagctctgtatggtaatgaaagccccatccccagagacagatgaattattgagagtccctggcatgtgtagctgcacctgaatttttcacctagaatgaaatgggtcagaatacaggtggaagggcatacactggcttctgtgcattatccctggactttgagaagtattgaggaagtggtaattataaggactatataattgcgtagctactttatgaagagagaaaatgcagacttaggtagattgatcaccagtgtgacgcaaggtgtgaatttcagaaagcctccttgatgctgtttaaaaagaccttcaccttctgtggctggagagacagttatgctgaaaatcaagcccacagcataattgtaagagttggaaaacttcaggaggggatgcgattctcagttttgataagacccttcgtgcaaaatcagggcatcagtgggagaaaatttaagcctgggagaggatcttgagggtattgtcagggataaaaagctggaaaggaataatttatggatatggcaacaccttccctgacacaggactttacgtcttggtaagggcccaagaactgtacctgataccctgctggggtggttctcaaagactggaaaaagtaatggtcatgttaaatgcagtagagtttccagaattttaggcacagagtatggagagaagaatcaaaaggctcagagaagtaagcatgcaaaactgggtatgaccagaatccatcatcatctgcctttgctcctttagagggccgaaggaacaacttgttttttcagggttctggtgttagtgacagcagcattgttgaaaagttcatttgtgtctatcctctgcaaatcaggactgacaatgggcaatgctgttataaaactggcctttctgccagcaatgtgggtgatgatggtccagagtggcagaagccaggtggcatcactcaatcaccaggaagaagatgggcacaactaccttactggcatccaggttgaaattgctgccacatggccttaaaccatggggatttatagatatggctaatagataatggtattttaaagagcaaaatagattggcaaccaacaaaggtattccttaatgtagataatcaaaaggaatcaaggatggaaaaaagaatgctgaggtcagctgccccagaggaaattcatgatcctttgcctattttctagagctgagctgattctcaaatctacaacccatcagttgaaggagaagaaggattctataacaccacagcaaatacatgcagcccttccccagaatgcttatagctgtttccttgagtaacaatatgctggggaagtggaaatatccagatcttttgagggttgttgtgtactggttttaatactgaacctggagaaccaaaatgccatcatggcctacatggaagattaaagtttcatggggaaccaataatgagtaaactcctggttcagggtaatctcagtgtgtctgacaggaagcctagaactgaatgtttgctcagttcacagatgtatcattagaatgggcatgtttagaagtaggcagaaccctcttggccaagacagtaattaaaaagcaatatcaaattccagggcaaaggtacagagtggcatgatcctatgtgttcaagaagtagcatatacagaggtccaggaaccaagggatgaagtagaaatggtcatgctctccatcactttcagagacctagatgggaatttgtgcttctcatctctgtaactttaggttgtgtggttacagagtttgttgttcccagagataacgtttccatcagggattcactaagactcccactaaacttaagactattgcttctgccagatcactttgggctccttgtattagtagaccaacagcaatagaaaggggttaacatgtggacaaagttaactgacttggattatcatgaggatatggagcttctgctatagaataaggacagtgaaaaatatgtttagaactcaggaattcactagaactcaggaattcaccttggtactcctatcctcggttttagttgtacacaggcagggacagaaaccactgcttgataaggacctgggagccagaggcttaaactcctcaaggatgaagttctgggtgaccctaccagacaaaccatcttgcccagcagaggtgctagcttagaggaaaggggactcagaaggggtggtgaaggagggagatgatggataccaattatagccttgggatataagcttcaccaatgcccagcattaaatttccccagacatgtaatcagttagaatcctagagaagctttgcatgaatgggctaaacatactgtgaaaagcaagcagatatgagcaatgcaagcaggagactggagcagatgattggggccccatccacatcccctttacaggggcactgcacccatcttccagacatagtgagttttggcaactaataattcctagctttatccttctctggagaattgccattggtccatgggaatcgccttgcacagaaatgtctgggaattatacactccatttcagacagcaatctacagcgaatgacacactgatgcctcaaggtgagacaaccctgtggtaccattcatgcctcagaactctacatgagatcgggatgtagctaggcttccctccaaaccatatctttcctttacttcttcctctgccttaccttgcttccagttccccacagatttcttggggagaacagcttcaataactcacttgcacaagaatccctatctcaggctcagctttcaaggaacctgaccactcgtcaagaacatacattgctcattattaccactcatcaagaacatccactgctaagacttccttgacattagcccttccctcctgtgcaagatgagttaaatctgttccaagcaggctcctttttcagcctgtttccccctatcttagcactgacccttctgcactgaatggaagtcttgtgtgagtgtaaagctatccctgaatctcagattcaatgcaactctaatttttcatataaacaagggtatgaaatattatgactgattagcctgtgaccaaatattgtaaaatgtatgcattttaaccaaactagtggtttggcctctttctgtctctctctcacacacacacacacctacacacacacatacataaaaccatgagttacctgctgatagtgttaaagtgtgaattgcctcttttcactctcttaggttaagctattttctgtttgtaaatataacctggagatcatcctgcagtgagttcctgtattcaaggcaatgaagcatgtcctcagagccatcagatattttggaacatccttgatttcagaccttgtcttgtagaacaatggctatattagttagagcaggttaactactgcaaatattatccccatatctccatggattagcatgataacagtttgtttctcattcacatcacaagcaaatgaaggatctattgtgcatggtcttccatgggccagtctttgattctatgggccagtccaggaagaggccatcctcccttctgcccacactatggcacatgtctctacctaaatgagaaggttttgggaaatatcattcagtacagtttctgggaagaaagagagaaacaagatattgatgagcaccagctctctctctctctctctgccattgtgaaatttccactgaagtgttatgctgtttagcacttcctaggatattcaaatagatccttatgggaagagcctctaatgaaattgaatctccttctctaagatacacaactgtatgctctttagcgtggcaatgccactggtaaatgctggttcaccacctcttcctgagacaaatggatctcagcagtaggagtttctaacaaataccactttagaaacaatactacaggttaactttttaggtctcgagtttttacagtgcattagattttttgtgccactgattatagtagctaaagtattgctaaacacacttgacaactgccaacacttgaaagtgcccctgctattcctaatgcctgtttcaatgtagcttgatacaaaactagtttctgctgcttggggacaatctaatttaactgaattgtcatttgtttttctcccactttccctttacatgaacttatcacaatcatgcctgccaccatggaaagtcaaggccagagccctccattttggctcgggaaatatcttaaacaatggatgtctagcctcatctttcactggttccccccatctgtttctctttggttttatacgttctacccatttcattgtgcctctatactgggatagacagctcacttgtaggttatctacccatccctgactctccagccctttcatgttggaagaatggaaattgtgcaaaagtcttaagaatgtacttagtttatttgttgaatgcttaacacatgccacaatacaatgatgagcaaaatgctcgtggtcctacccacacagagtttacagcctatgaaaaaagaactccttcttccctccctcacaaaaaagtaagcacttgaataaaaacattgcaagtagtgataaagactatgagagaaacaaacgatggaatatcatatgagatgttccaactgagagattgggaaaagcatggcatgtctgagaaactaagtgaaaggagttggaacataatgtacaagagtagaggaggagcggttgatgtgcttggagagataaataggggtcatttttaccctacccatcaccacctgggatggtggacaatggctgatatcaggcatgtacatgttctcacatacacacacacatttaagcatacaatttttcatcaccaccatgatacttctggcttctttccatcaagatcactataataaatccagtacttcaggcaacattcatttctgtagaaattccctagctattcctcaatgtttaatactccaaagcaagctattcagagttaggttatgctctgggttcacaaaacaagctgaggctatcacattgttgatttggcaccctctaggataaagaattgtacagagctttacccatggagtactcacattgtaaggctggcttgtagggacagctcaaatactctattagcagcccatgggtgtggcacataactaccagaggtccatctagcctaccagtgtcaggacagcttttccagttctcaacttgagttcaatgctgaccatagaaaagggtgtttttcgtctcagtggaacctagaggagaaggttcttgcctgaaagactgagaccttagatgtttctcacttgataaagtagaaaactgccatgcttcctgtggtggataccagtacccatgaggtcaatcccagcaaacaaagcatagagatgtactcatgttgggtatccccaccctggtcctagcctccctaatgtggaaaggcacaattaggcatatcctgaaatagatatccataatatctattccttataccaaggcctttactactatttgcaagaaatctttggtatttgcttattagtttgctgttgtccctctttgtatagtctttgacattgttatttctctggagactggcttcttttaatagactgaaaaataccaattgactgcctcagttactaacgtcagaattttaactcagtgctaaagctatcacagtcttcccctaatatgatcactctatgtgttctatcatttctctttactgtgacataaagaaagatatttttaacatgctcttgtgatatacaacctctaagatggggcccagcaatccctgcctcctgatgtttatgcctttgtgtgatcctctccccttgaatgttggctaagctttttgcctcacttataagaagaagaatataacagaaataatgaaatgtcatctccaagttgattccaaaggactgtggctgccatttgggtgcttgccttctgtctcttacttattttaagaaaagccagatgtcaagttgtgagctgacttttgaggaggctcaagtggcaactgagggagaactccctcagtcaacaaccagtgaggattgaggttctcagtctaacaacccatgaggagctgaatccttccaagagtaagcttacaagcagattatcttccaattgagcgtttggatgaaaccacagcactagcccacagcttcactaaaatctcatgagcgaccttgagccagaggcacacccattattgcatttctgatcaatgaagattgacaatgagataataattgttgagttttttattttaaaataattatagattcacagggaatttcagcaatagtgcagacgggtctcacatacacttcacccagtttctcccaatggttacaccttacataaccgtagtaaaaaatcaaaactatgaataaaaccaggtaccatatttgtgtagagttccatgccattttacccagtatatagattcatgaaaacacagcaatcaagacacaaaatttttccatcactacaaagatcttacttgcactacccgtttgtagccatatccctccagtataccatccctcattcttggtaatcactaatctcttctccagctccacaattttgttatttcaagaatgttatatgaatggaatcatacagcatatgaccttttgaggttgactttctcattcagcatagtactcttcatatccatctgttttttgttttaagccattaagtttttgtagtgatttgttacatggcaatagataattaatacaccactcctatgggaaaaattactttctgattagagtgtgagctgaaaatagacttaccactgggtacagaaacatgaatgctgactgattgcctcttataagtgttcatcatatcatagaaaagaaatttacaatgaccttaaactcatgttcctagggctcatctattcacacaatggatgagttagagaggaataaaattgtgtacatataaaccaacttttttcaaaatatatttcaccaaacaaagtgccatgagaggtatctctttgggcaacactcccgtacagttaagcacagaaaacaaagtataacacattggtgatcatggatggtcactaggtatgtaagaattactttagtttcttgggggaaaatgcatatgcttatatccttgagattcacaccaggagactctgattctgtagtctaaagtgggatgagttgagttgttttttttcccagttttaacaagcttttgagctgattctgaggtaagtgtcttaggatcatatttgtgaaaaataccattctacagcttttttcccttttattttgccagtctcggaacacttcctcatttcctttggtctttgatagcttaaattactatcttaatattgttcattgaatagtagggaacaaacaggaataagaatcacagataggaaacatgacgctagatctgccatcttctacctgtgctaccttaagatagttccttaagctgcctcagcctcagttacagtcatctcacacagctggtgtgaggctttcaaaatagtgtttaaatcatgctggtacgtggtaggagcactgtaaatcctagctagctttatagtactattcccctccttcctttcatttaattatttggaagctgctccatttaatggttctccagcaaacttgtctctttctttttagctgctggtagcctcgtgctttgccattgtgtctgggatcttgataatcacaatgcattttgtcattgcttttgccactgttgttcatgcagcagctccatggcaggacattcctctgtataaatcattatttatgggccaactgccaataaaaataaccacaggaaatatctaaaccctgattttgttttctaatacattttcccctttggaaaggacaccattattaagacatttttaaacaatttctggaaccagttacctctttactagagtctctagttggcaatgaaagaacgaacattaaatgctttcacaaaagtggctgagggaaaaataggaatcgtcgtgttaagaagaacagttatttaattatgagcattttatggtgctgttaaggtatcagaaccccacagcttgctttactaacgctgcatttctaaacctagctggtgctggtttccttccattttcaacatttcatttcctgggcaatttaaaaacagcaggccagtttggggataaacattaaaatacaaatacttcagctctagtgattttgcaaagcagccacacaaagcacttgcggttttaagcatatttttaaaaacacacattgctttgggaccgctgtgccataatatgttaccctgaataggttgttgattcgtggcaatgcatttaatgtcagtgcttttattatttaacataaaatttgggcaacaaaactggcccagattcagagggagggaaagctgacaagtttctatcttgttgatgtgctatttagcagagaatctgggtttgcaaaacacattgacctgctgcttcaggggtcttccagggggctttcttttaggaccagcagtggcgagtgctggttttttaaaaatcattatcattgtggttattacttttgcaaatacagttgtagccaagtatactaatacgcagatctcctataacgcttgcagtttactaaaggtttcctcctcatggactggctctattctcacaacagctctgtcagggtgaatgttaccactcccactatatagatgtggaagccgaggcccagatgagttaagtgatgcatgcaaagctcctaattggcagaaacagaagttgaactcaggtgtttgacccagtaccagaactcagctgatcttatttagtcaacgtctctccaaaatatcagaataattacacatttcaggtaaacaatagaaccatttgttaggaacaaatcaggcaggttagctatttgggaatgttccctttgttttaaatgttcaaatgtgcatttcccccactgaactcctgtatacccttcaaaagccagttactcctacacatgtctcttcccagttctaccagacgtcatcctctacttacatctttctaaaatagttgtaaagtacttctgtgcttggcactgtgctaagcattgaggctttagcagcaagaagtacagacactgtcttgagtatcaggaaattacaagtgggacaggtattaaactcaaaattgcaaacatgatttttaaattacagtggtgataaaggctacaaaagataagaacatggagttttaaggatgcacagtcaggatgcctaagctagatggagagagagaagagaggacagagaaggtagggaggggacataaaagaatcaagggcaggtttctctaagaaaacaatatggctcttattcttcagactgcgactagtggtttatatgttctttcccccattattctatataggtcttgatgacatgagtcatattttgtctatatttcattcatctctgagcttagggtaggggttcaatgatatttgtagctgttttgttgtgccctactgagccagcaaggcaacaaccctcttcctaaaccccaagataaaagctaggtgatgcatagtttccagctgattgttacctggtattttagggagattaaatcacacacaagggttgcttactagtatttcctctatcactgcctctattactgttactgttaataatcttacatttatatattcctgtatatgtgttgaaattatacatgtccatccatcatgttcttataacaggcctctatatatgtcataatattaagcattatgaactaatattaatgagattcataatatcaatatttagagcacttactttgtgctatgcccttttctaggaccttcataaatatttcctaatttaatcttcacagtattccaataagagaggaattattgttttacagatgaggaaactgataaagcaaaaggctccataacttgttcatggaacaagtaaaaggcggcggcacgatttgaactagtagtctgcatctggagcctatgatcttaggcactctccttaaatactttgtatttttgagacagtctcaccatgttgaccaggctggtctcaaactcctggccttaagcaatcctgttgcctcagccttccaaggagctgagattacaagcatgccccaccatgctcagctactccaaagtacatttttccatgatttgtctagtctaggacccacctagtccaatggtcttcctcattcagtactggcttgctgcagaattttagtctttatctaaaaaaaaaagtcattgggtggatgtacaacatgaatcagcgcatccaaatgacataattcacagggatattcatccatgaggagaagatggcattgccctgaatttgaggatgaggcaatacaatgcctatattcatcatgttccatcagttaacatttggattgaattgacccattaagagggtgactgacctgttggctatttgatttgataggtttcatagacaacaagaaggcttcagatgtagcaactgatcagcctgtcccagaggattcaaaactattatcatatagttggaatcttcagcaattcttcataagcacaaactgaaatagtcattttcttttcagttccattgattttttccccctttctatctgagaagccctatgcaggcagaacagaatctttcaatccagctttactgctccctagagtggtgcctgtttcctaatgaaccaagttcatggagaggggaggaccacacagactttcaatgtccctcctttacactttttttctccctaactagttgtgttagatttttgtattagtctgttctcatgctgctaataaagacatacctgaggctgggtaatttataaagaaaaagaggtttaatggactcacaatttcacatggctgggaagtctcacaatcacggtggaaggtgaaggagtagcaaacgcacttcttacatgacggctggcaagaatgcttgtgcagggaaactcccatttataaaaccatcacatctcgtgagacttattcactaccacgagaacagtatgggggaaactgcccctgtgattcaatgatctccacctggccttgcccttgacatgtggggagtattacaattcaaggtgagatttgggtgttggtggggacagccaaaccatatcaattttctgggacaagaaacatcaagacaaatctatggtccattcatctcctttgagagccatcagtgctctctccttttaatatcatttcaacatttatagaaccctttcattttcacattatactcatgcacataaaatttatttgctgtcttagaattttgctctttatgaaaatgtcccttgttcaggctttttctatgtgggcttttcctagtttcctttatttcctgctactcagcctatcatattcagagcatcctacttctcaagctatgaaggctggaaagtgctttggcctggtggtcaagtttggagttctagtttgggttctcttctgaagccaatcatgtgattacatcctctctatagtcctcctctttttcctttgtaaaattaggtgtgggggttgatgattggatcattgtaaagaactgtgccagctgtaattttttttttgttcctatttttctgatttttgttaagagttaagtgctagagttacttatgatcagagtagatggagggagacctggagataagtcagccaggtatttttgtgtgtgacttgaccaaattgcattaatgaggagagaggaagaaattgccattcctagctcacaatgacagcatctgagaaaacaaatcacccttccctcctggattccttaaatgacagagcacactggtggataagataaactggaactcagcttttgccatgaccacacttgacccaattgccatgtcttatccaagtgactgtatcttatccaagtgactcttgaccaaacacaggcagaagaagaattttgtatgtgtctggatttcagtggttttttcttctttatattaatcacttgtcagtggattcatccccgagctcagagctagcactgtacataggataagaaactaaaaggactagtttattttatttagtatttctaaaactttagatatcattctgcacagctataacccctgtagatttgcaagccacccttcatgaacttcccagagagtcctggtctgttagctctgacaagcttcttatttccttccatttctgactctccaaaagatccatcctggagctcagaaacaggcagcatattaaaaatggacactaatgtctgcactttctgctgcaaccatagatgtctattacagcaattggatctgcttgtttaaacccttcccagtaatacgaaccaggctttggagctgacagccacagcccttcaacagctactctatacccccaattaatgttcttaacatgtcttgaattttgagttgtttgagtttttaattaaatattgaagaatttttgtggcacaacatgacagcctattgccaaatcatttacctgatcatgttacattatatttaaagcacttgccctagtatgcaaaatcctctaagacatgcaaccaaccaaaatcactagggttttccataaattaaattttaagaaaagatacttataattttggttagcatttctccttctaaaagattccagagaaaaatctttccttcacagagttattaacattcaacagctcaacatattttaggaatttcattctttcattctttttttttttaaaaaaaaagatgaggtctcactgtgttgcccaggctggctccaactcctgtcctcaaggaatcttcccacttcagcttcccaaatagctgggattatgggcctgagctaccatgcttagctggaatttctttctttataaaagcatttatgaggtattgtgcatgctttaatatactatcttatttaatctttataaaaattctgtagcataataatttcttacttcccttgaagagatgagaaaactgaggtctaactagtagaacagcttgtacaaagtcacagaaggagaaattggcaaagccaggatttaaactgattccagttcagaaccctttctcaaactctagccctttgcttctgtctattagactcactaacaccttttccttgtggattaagggaatgactgataacctcacaaattttctttcagacctatgatcctatgatattaactaattcctcccttccttccttcctcctttcattcctccctccctctcttccttccttcctccctccctctcttccttccttctttccttccttcctccttcccccctccctccctcttccctccctctcttctttccttttctccctccctccttcccttccccccttccttccttccttctttccttgctcccttccacatttactgaacacctattatgtactataggccaagcatacaaaaaagatgctgcaaccacctcggagcatgttataacgcacttttccagtcctaggatagtctctggccttcatctatgcatccactcatgcattaactgagaaaatatttattgaacacatagtaatgaattatactaagctttagggattcagcaaataattcaggctctgtcctggatcacatagaacttctgctctggtgtttctacctggttctctcttcattttctcttttgcttccacatgcttattcataagggctttgctgagtcaggaggggttggcaggctcatgaattcagggtgcatattttcaagtaggaattgaggttatgagatgttctatcagccagtcatttccacttatttgatagtcaatcatggtaccaaaatatattttcatttatcttatttcttctcctcttcgttttgtttttatttaaccttttctatgtgcagttctcacctcccccaatttgtctgtaagctctttgagtcactctatggtgactacacagagtataggctataaaaatattcactgaataaattccaagtccatttctctgtcccttgttgttgctatgtgtctataaacatgaggtagcaactctaaagtcttgttataacaggctagcctgtaactatgaataatacatatatctcaagcaaactccccaccctggatagcaggcgctgccagtgaatgatactaccagtgactataacttcttgaggaatatagcaagtgctctcctaaaagttatgcaactccccaaagtggatttcagacttttctttccttctcaataacaacattacagagctgggtgtggaggatggtgtgggagggacaataaaacaaaagttgtcacatttgtcttaatctgtaccttgatttccttatcttggatttaagcttaacaataaaagacactccatctgtacctctatcacgtgaaagtgtttttataagcaataaacatattatttatattgtgaccaaagtttaaaccatatattgtattgcaggccaatttaatttttgttctttcattgtccattttgtgcttttaccttaccaggtttgtggcccattttttgggtcagtcctcccagctttgatactcatttatgccaagatgtttttgcttgataatagtttaattatcaacaatcttcagatactaataacatgtaaatactgagtatcatgacttttccaagtaaggaaatatggtagaataaagaaaccttgacactattcatcctacaacatgtagaaatgtgtctgatccactaatcttcccccaaggccaatattgctagaagatcaaatgttgaaatgttgcagaacattcattttattgatgcttgaaagggacacatataagagttaatagtttttgcactgtaatacctatgacaggtacaattctaaatgtctttcatgggttaaatcttcactgcaaccctgtgaaggggacgatattgtccccctcgacaccttttttttttttttttttttttttgagatggagtctcactctttcacctaggctggagtgcagtgatgcgatcttggctcactgcagcctctgcctcccagattcaagcgattctcccgcctcagcctccagagtatctgggaccacaggcatgcaccactatgcccagctaatttttgtgtttttagtagagatggggtttcaccatattggccaggctaatctctaactcctgacctcaagtgatccaagctgccactcccggcctcccaaaacgctacgattacaggcacgagccaccgcgcccggcctatccccaatatatagaagagaaaattgataaagggcagcctatccccattttatagaagaaattgatgaagggagaagccaggtaaacaaactgtgcaatggcactctagtagcaagaagagaaaggtttgaactcaggcagtctgacctctgagcctacccagttagtcaccatgacacactgagaaccactgcagtagtagcaatagaagagtgattcaaagtttcagaatacctcatgggaaaacaaagatcccttactgtgtaaactcaaactacctagccagtcacattttgttttgattcccaccccctcatctccatgtttcataccttctcatactgtctcatgcctatttttttgtgcactgtgtgacctctgtgtgacttgtgctctcacctttgcctaaggcttattcattttctgagttagcttaaggctcatctcctgtaggcaaatatggatgcttccttcgtataaaagaaaaacttcagctgaattaaatttaaaggagtttaattgagcaataaacgatttgcaaattgggcagccttctgagccagaataggctcagagacttcagcacagccacgtggtggaagaagatatatggacagaaaaaggaaggtgacatacagaaaacagaaatgaggtacagaaacagctggattggtaacagctcagcacttgccttatttgaacacggttcaaacagttggctacatttgattggccaaaactgcgtgactggcacaagtgtaggctacggtctgtttacacctccacttgttataggtcacgaagtacagtaaaaccattagactgaacttaaatatatatggaggcagctttaggctaaacttgatttaacacttctatgagttcccattgcccaatacacatacccaccgtggtgcatttatcttcacatactgtaatcatctgtttacctctttgttcaatagacagtcagttcttgagagctgggatgagcctttccatctccatttcaccatcatctagcatactatctgatgcctgtagaaagattcatatgagcctaccatctgtgagtggagctgggaggaaactgactttatattaatgaaaactacccagagtctgattcacttacaaatgtatttcactatttgaagcagaattctttttctaaaaaattgtggaaggcatcaaacatttcagttttcttttgtggttttccaaatcacaaaactacctagaaggcatattatatgtttaaaaattaagaaataaaataaatcacttttttttttgagatggaatcttgccctgtcgccaggctggagtgcagtggtgccatcttggctcactgcaacctccgcctttcaggttcaagcgattctcctccctcagccactgcagtacctgggactacaggcatgtacatcacaccggctaatttttgtatttttagaagagacgggatttgaccatgttggccaggctggtctcgaactcctgacctcaggtgatccacccgcctccgcctcccaaaatgttgggattacagacataaaccaccacactcagccccaaaacaagatttaggattgtgtgtttcctgtttccctggtttcttcacctcttctgcttcttaaaggcggtctttgtcactagaatattgtgatgcagcctcaggaaaataagaagagaggggtagatccagaaacagaagacagaaggaaggactgagccaaaacaactaaatcaatctacacgatgaagagcaaagcaacagggagaaggccagagaaaagaaaataagcaacctggactggaatagagaaagtgaagggtaaccatgtgaaggattctggatgaaacagttataagaggaaactggggggtgtactggcagctataagaaataagacaggacatggatattcttttatttttatgagagatgtgagcaaaaacattttagaaattatttgtggctaatcaactgtaattctttctttctttctttctttttttttgagatggaatctcgctctgtcatccaggctggagtgcaatggtgctatctagggtcactgcaacctcccaacctctgcctcccaggttcaagcaattgtcctgcctcagcctccccagtagctgggattactggtgcccgccaccatgcccggctaattttttttttgtatttttactagagatggggtttcaccatgttgaccaggctggtctcaaactcctgacttcaagtgatccacctgcttgggcctcccaaattgtttggattacaggcgtgagccactgcacctggacaactgcaattctgtaaatatgactcctttaagaaacagagccaggatacctaaggctatatgtaccattttattccagaattttggccatagctacatgcgtattttacaaaaatgctcaaaagatatgtcaaaaatttttcagtttttaatttcactcaagggcagtgtccagtaggagtgagatgaatttatactttatcaacttactctagtaatgttttctttttccttatagagggcactccagaggctgactctctgttctgtccttcaacctagctttgcctaaggctagagacatccttgattcagagagatttgtgccatttactatggagcagtatttcaaaaagtttccaggtcctgaatccctttgagaatccaatggaaagtatggacatgcttcaaaaaaataaatgcactgtattagcccattttcacactgctgataaagacatacctgagactggacaatttacaaaagaaaggagttcaattggcctcgcagttccacgtggatggggaggcctcacaatcatggtggaaggcaaggaggagcaagtcacatcttacatggaggcagcggtagaaagagagcttgtgcaaagaaactcctgtttttaaaaccatcagatattgtgagactcattcactatcatgagaacagcactggaaagacctgcccccataatgaatcccaccaggatccttccacgacatgtgggaattgtgggagttacaattcgagataaggtttgggtggggacacagccaagccatatcatgcaaataagaaaatacacacaaaattttgcttacactttgaagagactcaggaattcctgaagtctttctgtgagccttccaggcatccacagacccacattaccaatccctactgtccctagatgggctcatttgcatatcaagctccgccatgttagaacacttcatcttacttctcatctcaaataagcaacatttctggctaaattttctctgggaaaagatggagttttgcttaaccctaatgtgattctggtgtctagaaatctcaaatctgatcctttcacctgtgactagagaccacagaatcactcagcatgttaacaaagacaaatgttggtctttatcatttccaagataatttaaagtcactgtcctgcatgggacattgtttaataattgatatgcagttctgagtggcaggtttttgatgaacagttgaggtctttgggttagaacggtcacccatgaaggaagaggtcggagataacaaaagcccgcaagggtactcctgctgctatactgggtaccatctgtaattgatgagtggttttcaaagccatccccagctaaagcattttgcagtaatccactcagacaatacttacttgctgccaataaatcccgtaattcaggctgtccacctgaatcactcctcaaggagtgtgagtaaaggcttcttcctcctctctacttcctccctctcaatcatctctctctcaggagcaggccagcactactgaaggcagttaaattcatctcagatctcactgtcaaatgaaatgttaaaattccctcaacctctcagaagaaacttttgacaatcaagtaatataacaattccaaccagatgtcaaatacttttagaatacaatttttcatatctcgcttttttcctccaatcatttttatggcaaacattaataaaaataaaatactatgttcttaagaattatgacacagatgctttttccttgctgaagtatgagccttcctttttcaatgagataccaagggcaaaaaaaaaaaaaagtattcttaatgttaaccacaaacagcatttatacttctgggccagagtaggacctcaatgttatataattgtatttacattatataacaaaataagatttgaataaaaaacaaaagtttgtgagtccctgctatgcactaggtactgtaccagagctgagggccaggttttctttctgaaaaatacgagttgaaaatcttttgaaacaaaaaatgtcaacctcatatagaataatggtttttacaaaaataaatacaagaggaaaaaacctttaaaagtgtgggagaaaacaaaacaagatatcaatgtccagaataagggatattctgaataaaattaatccaattgaaaacaaagcgttcccatttttcatgtaatgtcagaagtggttaaacctcatcaggaataatttcttccatattaaccccactatgagtatatgtaagagtaagatccaacatctctaaatactttattcctctcagattgagggaaatgcattttccttcacttctaccttcaacagagcaaggcccagagtattatgacatcctaagggagagaactgcaaacactattctgtaacgaacatttgtcattcttgtgtcattcttgccattcatgtgtcattcttgcataatagctgaaacccattcctccttggagaatccctccctttgtgggcaaagcacaatttgtgtgtccctgtggagactgaaaatgtctgatactcattttactagccttcccttgcacctagagatagccccacaacttgggctctatcaatctgatttctgcacctggacctttaatttaatgtgaatctaaaaagcagaggtactagagataagtctatggcatgggtggtggttataaaaagatgaatcatccagagcagctgtgctggtggtggtataaagtgtggagtgccagctacagcagcagggtaagctgcaatgtgtggcacaccatagtggtggcagtattgtccacggggttcagctctggggtgtgaattggaccatggtttcctgttctgaaatctttcagccaggatctcttgcaatctagtctgctcttaagctgttcactaagtatcctcctcattgtctttagaggtgtattaaaggtgtattaaagcaagtttttgcctcactgcaatcttacttttcatcttcttgtatcactaaacatttttttaaatttggacataagttaaacttatacaaaagttgcaagactaattcaaagaattcctggatatcgctttggccagatttctaatattaatatttttctacattgacctcctcctcgtcctcctctttcttccctctccccctccttctccctctcctctctcaccccctttctctctgtgtagtttttctaaactgtttaatagtaaattgtagacatgatgctttttccctaaaatggcattgtgtttttactaaaaaataattatcttacataatcacagcctacttttcaaaatcagattacatacaacactatgatctgatctgcagaccttattctgaatttgccaattgtcccaataatgtcttgtctagcaaaagaaaattcaaaatcattctggaactagtttagtacatttgaaataaatgtatatcttgtttaaatcagccagagttgttttctgtttcttgtgacagataactaaaattgattttaaaaaaatggaagcagggatgaagttctgcaagtaacacattttgaaatgtctaattacctatatggaaaaagtagggacaaaggggagagaggacctcagtgtgctgggctgacatgttgttaaacgattgtgtgctgaagccttgagaccatttacatcctaaagaagctgccctatgaatgaaaattgtaggaattgttcagaaggttgacaaatgccagcaatttcttctggtcatcagtagcctcctataagaaagagacctaaggaaaacatggcccttcttctttctctagaatcatgtctgaacatgatgcctggggctctaatattcattttgcaactagagggagaagactaaaggcaaggacaagcctctgaggaagggatggcgtagatgtggaaacaatgggcactttggaatacggccgagcaatcctacctccggactttgagcattctgcgatacaatttcttattattcaagccagtttctgtcactgtttcctattacacagagccgaaaacaccctaaagataaacatactcagttaaatgactccagctctgtgttgacactttgtttgatgtgttagatgttctcataaatataaaactagaggaggtgtcattatcctctattatatcatacagctagattgctagatcttccaaacatggtatttctttttttaaagcatcagagaggatggaataaagttttaaaaccaccaaagatctataaaataacactggtgaaaacaatatgaaaacgcctcctaaaaatgagcttctttgtgttcttgcataacagataaaaatttcaacttttatttatttatttacttattgtttgtttgtttattttagattcaggatcttgttctgtttcccaggctagaatgcagtgggacaaccatggcttgctgcaacctcgaactcctcagctcaaacaatccaacaatattgtgatggttaatactgactgtcaacttgattggattgaaggatacaaagtattgatcctgggtgtgtctgtgagactgttgtcaaaggagattaaaatttgagtaagtgggctgggaaaggcagacccacccttaatggtaggcaccacctaatcacctgccatagaatctagaataaaaagctggcagaaaaatgtgaaacgagagactggcctagcctcctagcctacatctttctcccgtgctggattcttcctgcccttgaagaccagactccaagttcttcagttttggtactcgggctggctctccttgctcctcagcctgcagatagcctatagtggggcttgtggtcatatgagttaatacttaataaactcatatatatatatatatatatatatatatatatatgtaaaacttaataaactcatatatatataaaacttaaacatatatatatattccattagttctgtccctctagagaaccctaatacaaatatttattaaggagctaataagtactaagttgttagtgctaagtagtcctttgtatgaattaatgtattagtctatacagtatgctatgcaacagttattagttccattttatagatgaggaaactgaggattagagagataaaccaactttaccaatttcacagagatcataaataatgcagtcaagattcgggattcaataatgcaatctgctacttttttttcgataattaggccaaagtgataactctcctcgagggaaaattaaattaaaggttgcatttaaactgaaaaataggtatgtgtgttatacgggtataatttccaaacccttatggatgcctttgaagagatggaggtgttagtttgaaggaaggggattgatatatttccatcatcaatgaccccctaccctactccagagcagccacagccacccaactccctccacagataaagaagtggctggcacagaggcaccatagcagaattgtaatgttttcagaggactcgtcatgtttaacaaaggaccctcacagagcagctagggctaacggcttcatttcctggaaaatgaatctgagatacttgctcagttatatccctgacccactctcttgtgcttcagagggaaagataggcttgtgtgctgccccaaggtggggaaattcctgcttatttttacagcggtcatgacccatttcagctgtgcaaggatttctatcttcactatatctgctcactggcagcctgaaacttcagtttcaaagacaggcctggatcattcttcaccagagaaacacagaagtatgtttctatcactgatgctccatctttaaaacatcactgatctgagtttcacacatcctgtctctgaaagagacaagatatagggtgtttgctagagggcacaggggcaatagcagggttttgtttatagattgagtatttaacttctattctgcagcaataatatgtagatattatctctccaacataggtctaaacaattaactatgtttagggccaaaacactaggaataacccttattttctcacttttcttcacatctgtcatccaatctatctgcaaatcttgcctactcattttctaggattgcttgatagtgatccatttccatagttagccaatcatcatctgggaaaaaaataataaaagctaccatttgtgatctacttaccttctgccagacactgagctaccactttgtatgcattacattaatgaatccccacaacaaacctgtcatctgatattgtcatcttcacataacaaatgaggaaaccaaggctctgagtggttaagtaatcttcctacatctccacagctagtgagtggtggtactctaatatcagtaatgccaatgttgaaaggtagatccaagaccctccagatctgtcaaaatgccattttatccacttcctaaaatagcagactgaaaaagaaaaaaaaatagaaacaattattgttctgtaattaacctcctttccagtagaatcaaatgctaaggagaggggcatggtattgtgggtgtttgggagaaatataaagcagaaatgggatagagcattagtcagttttcagcatatggcttttcttcttgcaaaaatatctccattcggcgttcacaacactactcacacctgattttcttctaacctgaaacttgtgccttcttggactccatttctggttcctccgcctctgctaacccttaactctgtcctccaccctcttttctctccaaattccttctctaggtgatctcatcctcttctatggcttaaaataacatttttgtaccgatgactcataaatctctatctccagctcttaccactcccctgggctctagatttatatacccaactgcctacttgacatcacctctgagctgtctaatagacatctctaatttagtatttccaaaataaaattcttgatttacccacagccatcttccccatctctcagttgctggtatcaccaccgatcaagtttcttgggccaaaacactagcaataacccttattttctcactgttcttcacatctgtcatctaatctatctgcaaatcttgtctactcttatttccaaaatacattcaagatcccaccacttatcaccatctctattgctacaaccccaatcgaaatgactaatttctcacagctgggctgcaatgggctgcttccactcttcccctgccagaattcattctccatgcagtagccagccagagtgatctttttaaagagtaaaacagatcaaattgatccattgcttaaaagctttcaatggttccactgggtttcgagtaaaacagaaacttcccaacatgaccagcaaaactgtacacaatgcactccttgccagcctctcagacatgaccacatacttctctccttaccattctcccaactccctggccttctttctatccttccaatacactgagctccttcacgtctctggcctttttcaccagccgttccttctgcatagactgctctttcctcagatcttctatgattgcctcttccccccctgtgagtctcagctcaaatgtccccaccttagaatggttttactggccattccagcaaaaacattttcttccattctctcctccaattttcactatataccattacccagttttattattgtaaaaacacattatatgaaaactgttgttgtttttgatttttaattgagacagtcttgctctgtcatccaggatggagtgcagtggcgcaatctcagctcactgcaacctccacctctcaggttcaagtgattcccatgcctcagctttcctagtagctgaacaggtatgcgccatcatgcccggctaatttttgtatttttactagagactgggttccgccatgttgcctacactggcctcaaactcctggcctcaagtaatccgcctgcctcggcttccccaagtcctgggattacaggtataaaccactgcacccggcccaaaaagcatttcttcatgttcatcatttgtcatctttctctgcccccctagaaaatgagatgcagaaagacaaccctatccaaaagaaagtcttgtactttgggaggctgaggtgggcagatcacgaggtcaggagttcaagactatcctggctaacacagtgaaaccccatctctactaaaaatacaaaaaattagctgggcgtggtggcatgcatctgtagtcccagcttctcaggaggctgaggcaggagaatcgcttaaacctgggaggcagaggttgcagtgagccgagatcctgccactgccctccagcctgggcgtcagagcaaaactctgttttgctcaaaaaaaaaaaaaagtctcctggtcaatgaaagctgagctctatggtaccgaaagggagatcaagattcttcaaagattaagtgaattatcccacaatagtatccactcatgatcaaagaattcattaaaagtcatcaagaaggagtcaggctgggttcagtgactcacatctgaaatcccagcactttgggaggccaaggtaagaggattgcttcaggccaggaattcaagaccagcctgggcaacttggtgagaccccatctttacaaaaattagaaaattagctaggcatggtggtgtgtgcctgtaatcctagctacttgggaggctgagtctgaagagttgctttaacccaggagttccagtctcagtcacccattattgtaccactgcactccagcctaggttacagagcaagactctatctccaaaaataaaaagaaaacaaaaagaagaaacattcagattaaaacactggtttctggaatccattgacccacggaatatgttctaagttagaaagtacagatattctagtcatttaggtggactttcaattttaaataaacaaatcagcacttttttctgtaatctcttagaagtttgaatgtgtattccagttgcctgggacaaaatcatttaataacaatcaagtttcaggggtctacaaaactgaaaactagatttctcttattctggtcaattttttaaagcatctttttaaaaaaaaaaattggagtaatacatcaaaaacaaagtctgtggcattggctcagtgatcaggtggcaggcagcaacgaatcttcagttgcagctggaatgacagcaatctatgttatgcacaaatgagctattttgtaaaattgtcacctgtgaaaacttaaaaggaaggtaatgtcctctgtgaacttatagctataggcaaaatgattgaaaaatagaacttctagcaagtgtcaatcactgttggcttcatttgacaaaatactactataaaacaatgagctaaaaacgaattaacaagcaagcaagtatgaaagataacagagatggtcaagaaaatttgaagacttggagaattggacaaggcaattgtttcttatcactaattagagacagactgataagaacacagtcttgcatcaaggaataaatcaaggatatggtttccacacaagtttttaacctttgaatgggttaacataacaacccagttagtatttcatatggacagaatgactcaatttttttttaagactgaagctgcggctcttctactgaagcttagctgacttaagatatctacagttcagagaaaacacagagaagcatgtatcaaaaaagttgtgtatggggctgttggcacaagaaattgaccataatcaactataaaaagaagctgattacttttttgagaaacttgtacagccaaagaaataatgaaccttctaaaacttttgtgtaaagacaaaaacattaacatggttaagtacgtgaacttcttagagcaagtatcagactaagaaagcttctcatccttgaaggagtgtacattctataacacactctgcagacatagccaaggcaacaatagaaaaggaagaacctccaaagaacaaaattaagggccatggactggagaaccccttcccaggcgtcaaatcagaacataattaagagctttcctcatcccagggaatggggactggcagtaaaatatcagaatttatacaaaccagccttggcaatattatagacaccttgccccattctgctattttgtactaagtgtcaggggaaagagataatcttttttgtttttgttttttttcagttgattttataaccaaaaggagccacacccagacctgataaagagaccacttggttaccacccagaaactatagacataagagttttatgccataaaactggatacgtttattctgtaagatgggataagactttggggttgtttccatagggacacactgagtgagctgaatactgatgaccataagtggtatccttagtactgctcacaaaatatttctaattctctcatactcaattacatagaggattataatgtcttgctctcttttgcatggatgggacatgtgtctggatctgaccaatgagtttgaatagaagcaacattttacttccaggttagagccatgaattcccagtgtgaaaccttccagggctcctttctatatgacattgtgaacaccatttatttcaatgctatcttcagcctggcatcctgagtgactgatgagcaaagcttccctgctgattcacaatagccatatagcacatgtattgttgttttaagtcactaaaatttcagagtttttgttctttgagactgtgcctgagtctctggtaaagttccttctttgacaacctttgaaaaattttttattttatcattttacaacaatggattaatactctgtgcactgttttacagcctactcataaaaatagtcacatgtatctttctgtatcctttatatatttttatgcaatgtcagcattcatggctgcctaataatccataatagagatgttatataatttttactcaatcccacattgataaaactaaatgagatatttcaagcatttagtattataaataataatataatgtgtattccgacagctaaattttaacagtagattcatgatgacttccagttcttaggatttgtgcatcaaagcatatgcaaaattttaaagattttgacatttattcatttattcaggttttcttctaggcattagggatagtaatgaataagatgtacaaagccttcacagagcatatttccaagttgttttcagagtctgctgatgtcctctaatacaccctactaccaaaaaagtgagtgcccacgttcccacactgttggccacgttgcttatgagcatgtaaaaattgtctctcttgttagccataacatcatctgtccagaatgtcttacctatatttgaagatgacaagagtggtagtaaccccacaaccacaggccaaccaaaagatgtttgtttattctcagaagagtgcacaacacaaactacaatgagcagtcaaccttctctatcaacttgggaaaaggggcaaatcctgcatgactattgtctaccttgtagcatttcttccattatacacgttgtttgcatctccttttctcaatagactatcaggtccttgaaaaagaacaaggaagaatgcttaaagaggtgttaaggcagtcagttactcaagccaagctgcaggagataggggatgaatcacaaccctgcttacaccttgcagcttcactatgtcagttgcaacaaacagtgagtgcctgtgctcgcctctgctcacatcatctccctccaccaacaggcaagttaattatgcaaataaaggcagcaactgttgtgcagttgaaagagcctggtcgcagaaaccagtaatcttttgcagaaaaatggagttagagaaacagctgtaatttggcaccgtttatgtagatgtaagtttcctacttacattataagaaaaaacaaaataaatgaaagtagatgtctatagattcttttttcacactaattccacatgcacagcaatggtgatgtggagaacagaatttcataccccaaattcaaggaacttaaaattcaaactcaaaacaactattcactgaaatttcactgtaagtttgtatgacgaagtgttaaggatgattttttttaagcctctcaagggaggatttggggaagagcctaaaaggattatgattttgatattttataaggatattattatttttcaataagatataaaatatttactgtcagtgatggtgtgctgagtgatttgtagatattacagtgacaacatagcatttaagcatgtacttcatcctacataagcaataatttaagctatatatcaaaaccttaaaaaaatccaaaccccagggcaattgaaattggctatctctgaaagtaagtgtgtgtatatccttaatattattagttctctgtgggttttctccaaatattcccacttagatttttcctaccaaacttgtaaattttagtcaaacaccgtgaagtggtgtgcaatatagagatggaaaaggaaatctgatagacttactgccctatttaatttgccagaatgattttcgtttcttttgagtttctttctgggtccttgaggaatgttttgtctttctctagagtgggagtgcaatgtataaatcttccaaaagcttggcttacacttcgtctcttactcagagaaaaaattttccagcaggcattcagctttcttacatcaactgctctcacctcactgacccaacctagttcctccacctcttccacagaggctctctgtgcaactcagggccatcttcactatttttgttgatctttttttaacctgattgtatctttttttctgtatctctaatgtctgcttagttctgttgccctgcatttatttattttgtttgccacaactaaaatgtcttctttccagcatatacgacctcacgctctgtatttccttaaagtacagctccaggctcacctctgcccttaaaccttccttgaattctcttgctcaatggcgaatattcttggatgtcccacagatcaggcatgcaggatgatcccacacttgcttacataataacttgggattacttattttccaactttttaggcagacaaacatatctgacttacccaataaatatagtagaaaacttattggactaggaattagagccctgtggcccaccacataaatttttaaatattaccttaagcaaagtacctaacaactgtgtctttgtcttgaaaagagaacatagaattacaataacatcattttttaaactaccttcagttttaacgttatgtgaatcttcaagagtaaagattatcttttgtttcccttgtgtctttcacaacatctaccacagagctggacaaatagtaatttaataaatgtaatttaacaaatttaataagtaactgtcgggaaatggatagacggtggatgggttggtgatcgctcactctgtgatcttatcaactttataatccttcgtttctttgaaccagcctaaagcaaaatcaccagatacttaattgttctctttctatattgatcacatatgaatattacttttttccttttcttgtttgcttcccagattgacttcaataaaggaaaacactctgcctcgcatggtttcttcagaaaagccctgtggaatctacctgttgaaataagcacgtctagctgcttctacaactttaattactaaaaaaagaaaagatccaatgcaacactgagaaatgttatatattttttaaaatgactgcttcttatgagaaaagataatgttgcataaccaagacctgatattcaattctcatctatggtaactctggctgtttcaattatgtgaaatcatgttcatcaacaatttgacagagaaaagcaaaagaaaattatttcatgtcttctaacagctgcagatttgtgagcagagagcaaatgacaggagtatatttggatcaaaatgtgaagatgtgcttaattctattccaacactcattctcagccccatttttaacatataagaattcattctcatgtacaccaaccagatccagacttccatgggatttactaccatgagggacggtggagtttgttatgacataaacccttactccaaatatccaacctacaagataagtttcctaattcatacaacactctatcctgtttcaggcacaattaaaatatctttctttattccaaaatcaagatattccatggtgatgagaatgagaaccacccattctggcttggatggtctccattttaaatgttgcgtaggaagattatctaagtatagacctacttgacaggttgtacttcaatttttaatttcgatcccatggtcaccatagctgtgggtcataaactaattttagtgatgatcttggcaatatccttctcaatttataattactcaataatcatatatcaattagaaatgtactcagtcagccaatattgcaaatatttactgggtgcttattaggtgtcaggttctgtgacatgatttgaagacacaatgaaaaacaaaatacaatatcaaccctctagaaaagaggtcaactaacttttctgcaaacggccaagtagtaaatcttttaggcttgtggaccatattgtttctatcacagctattcaactgtgccattgtaacgggaaagcagccataggaatataaacaaatgtgcctggttgtgttccaataaaactttatttcaaaaagcaggtggcaggactagatgtggcccatccatcatagttttccaattcctgctgtaattgcctagggtctaaagcagtaccatctaataagaatataatgcaaggcacaaatatgagccatggatatacttttaaactttcagttagacacactttgaaaagtaaaaagcaataagtggggttaattttaataatatgttttatttgactgggtatatcccaaatattatcatgacaacacgtaaacaagtacttaaaaattactaagcaacatactaggtttttgaaatctgatgtttgttttacatgtacagcactgttcaattcgtctcagtcacatttcaagtgctcagtagccaccacagtggttagtggccaccatgttacacagctcaggtctaaacagatgcataattggtagggataagcatgaagtatttagagtgaacatgaaggaggaaaagccaaccttatatccatggtggttatggctggtgatcagggagagtttttatagaaaagaaatccagcatgaagaacaggaattccctagttgaggatagaaagaaagacgattttgaacagagaggaaatatgcataaaaacctcaagagggagaaaggtgcagcttcttaaaacaatttaaagcagctccatatgtatatgtataaagtcagggtgggtggtgtggaccctgagctaagggagtggcattgggaatggagggaagtgacttagatgtgagagatattaatgagacagaatagacacagcttggagatggattggacatagatcagatgaggaagaaggaagcagcaaggatgaggtggagggttttagcttgcacagaatgcaaagatgaagctatcatttgttgagatgggacatgcagaagcaggagtagagttggggaaaggtgaagagttcagcctgtgaggcctcagggagatgggcacaaagataacaaaagacgtgcaaaagccacatccatgtgcagaacatgccttcatgctcaggaaggccttttacggcaagagctgccctcatgctgtgagccaaagtctctctccacactccctccaacctaaatttttatctagtagctctgccaccacatgaagggctaaaatcctgattctgttggcctagactgcttgttctttcccttctgttttatgtacttagctcctgctcattttcaggtctcagtttaaatgccacttctcagggagacttctcagataccccagatgatccccttgccacataaattcatgtatctttcctcggtgacagttttcacacttgtaatttcacaagcatttgtgtaattatttgattattgactttctgtcttgaaaataaagtttagtaagcaagaactgtgtttattcttgcttgacactgtgatactaccctctgccatttacctagcacatcatggatgttcaataaatatttgtggaattaattaacataatattaaaagtcactgttgagattcaaacttatctggaaaagactgtgaaccttagcatgaatcaatacaatggattccaatattcatccacaaatacaatctggcaagacgtattacttctctttatttttctatcattgaatctatttttatttttaattcttcatttacagctaaggtggcaaaaaattaatctcagtcattttatgtttcctgacattactggaggcattcccagtccaggaatccttttctactgaatacagaaattagatccctaatttctcataagttttttctataattggggttacgcccagagtcttcaccctttctttgaggggatgggcttttaaaaaccacagccaaaatgattgatttctcccccagttttctgccatataatagccatttccttaggtaatgaatgtacaaaactttagctgcatgactggaagtagagggtggaagagagggataaaagataaattttggagaaaaaaattggtcaataactttaaaaagctgttgtcctatcacattcatctacctaaaacataagaggtattgcttctcacccttttggctaagatcaagtgtgaaaaataaggggtcataaatgattttgcatgaacagatttagcatcacagaaattttaactgcaacaagacagatgaggaagaacaaacaatattttccaggtaaggtctatccctgtggaatgtagcacaatctgggatagagtaagctctcagctcatagttcctgaattgaagagcatcctaaatttctcctctgtaattactcattaagtgcctgttaaattgtcatctccatctctggatcataagttccatgaagggatgaactttgaatcagggaccttgtgtcatgctgccagcacctactataatgcctgtcacaaaataagtgctggacaagtatttattaaataaataaatgtattaaacaggaaaaaggaagatgagaatgtacagagccaaaattcctctttcttcaaatcccagctcaaattttaagccttcatcttcttagaagctccccttagaagtttttgctcacacctctgacctcccccaaatgctttgtttagtcttcttagagtatttattaggaaacagtatacacaatggtaaggatacaaacccaggaaccagaatttgtttgaatactagctcccgctgtttgtaagctgcattatcttgagcaaattacttaaggtccctgagctctgctttcttatccacaaaattgagaaaattatatgatcaattttattaggcttgttgtaaggattaaactacataataaatgaaaaacatttagtccaatatccaacacatagtaagcactcaacaattatctattacatgtatcactctccactttggcaatgatagttttaaaactgctgcgtttattgaacatttactatattcctagtactatggaaagcccagaatatgttttcttaaataatatgggtttatatgagttttcacaatgcagccatagttgattctatgggttattattttacctatcagccattatgaaactgagactgaaagggattacataaactgtctgagttctcataagtagtaattagatttactgtcatttgagcacagctgatattgcaggagccccacacactgtctccatagatgtacacatcttatgtcttgtactgaattgtaaattccattgcaggcaaggatttgatctgatttatctttgtatcccctgatgtatctagcttaataccttatatgccaatgatgagtaaatatttattaagtgattgtatacaaagtgaagggacctcaaagtcaaactttatcaatgtcacaattctgtcctagcattaactctgcagaagttgttcacatgcattttgagtagagggaatcctttctagcagcacccatactaacagtcacattctaaagggcagtgctgccccaacaaaaatggcatgtaaataggtcctttgtgccaccacgtctatctgcacattggctgggctcatccaatacttagtaccctagaaagttggtatttatactatggcagcagcatggactgtacatatttgaaattttaaaaattgtttatgatggatgcagtgatcttcctcagaaaatactaatagcaaccattgttcagaataaagaatcaagaacttgagcatcagacacaaaacaggagcagctaggaagtgaattgccagctccagagaggaaaggacttaactggtaaagagtataagagttcacagtaaaatagagctaccattcaacccagcaatctcattattgggtatatacccaaacgaatataaatctttctaccataaagactcatgcacatgtatgttcattgcagccctgttcacagtagcaaagacaaggaatcaacctacatgcctatcaatggtggactgaataaaggaaatctggtacatataaaccatggaatgcagccacaaaaaaaaaaaaaaaaaaaaaaaggaatgtaatcatatcctcttcagcaacatagatggtgctggaggtcattatcctaagggaattaatgcagaaacagaaaaccaagtattgcatgttctgacttacacatgggagataaacattgagtacacaagggagggaacgacagactctggggcctacttgagggtggagggtaggaggagggtgaggatttaaaaattacctatcgagtactatgcttattacctgggtgacaaaattatctgtacaccaaaaccccaagacgcaatttacccttgaaacaaacctgctcacgtactccttgaactaaaataaaagttggaaagaaaacacataaaaataataaaaattttacaaagagttcacaggattccaaaactgctagagcagcagttctttaagtttggtccatggaccatcagcactggcatcacctgggaactcaacaagcaatgtaaactctcaggccccacccagatttttgaaataagaaactttaatatgagacccaacaaactgttacaagaagccctcaggatgattctgatgaatactcaagtttgagaaccactgagtagagcatagatcttcacaatgtataacttcattctccagatatgaattctgagacacataattttttcatgaccacacagctagttagtaacgaccagaataggtacctcctggttcagagtaaggagggctgggaaaggtaaaggcagatgtaaggaaactttatgttcctggagcctaagtctcatttttaaaatatagattgtgagaacggctgttatttctggatgaaggctgcagggacaggctctgaagaccactggattaatggttggaagtgctagagtaaaaagagttaaaccagtgttctttactgaaaaacatttaatatgaggatatggaatattaatcttctggaggataacagggtaaatagcatttaaaaatttttttttgaccataaactgtgttaggttataaaaacagaaaaagtgaaatgccccagaagctggccaggttgccatgtgaccaccatacacttccgtttctggttcttaatttcagaagtttctttctaaagcagcattcagggaaaaaaaatgggaaatgctggcctacatttatgtcaaaatagtaagtaatttttgttttataactgatttatgttttaattttcaatcaatcagtcagaatcacatgtgcttaccttgtagttcacagggtcctaaagggttcctggttcccaaggttctataagctccctgaaattataagcaacattttgagtatgtgtaaatgtggtatttttctgggggatttccagagatttttcattaaattttctaagggacctatggcttatgcaatcactagatttgttagctccctgaaaatgcagctagtgacatctgggttttccctttattaacttagagtctcacaatttttcacttaattctactacagaattctcctgattgctcatgttacttccattccagtctttcttgggtctgtactctaattttcttaaatttctaatctattacattcatttctaaaaacctttaatggctccactgttgactgccaattcaagtacaaatgctgtagacctcccacaataaggctcttattatcttgtctttctctcattcttgtgtatcctacagccaaatagacaactttctccaaagatatacttacccatactacctctatatttggactgcctaggtctatttccttcttcaacattctttacatgcttctaaaaagccttctcttccatgaagtcttcttgattccccaaatatttattatgattttcaccttccatcatgaacccaaagtaaatatgtgccaatctcttatgaaactaatcctacttggaattcatataatcattattgatgtgcttactacccatcctgtgccagggcacaggaactgttattccccttgttttaaatttgtcattgggtcctttcactggatcaccccattcaaggctttcaccaaaaaagtagtattggcccctatcatgttttaatctgaaatgctcagattttgatttttaaaaagatttgttttctagttcagaaaccgaaccacagacagcggcttctatgcaagctcgtcttatttctaagatgaaagaatactattaaggcagatcaataaaacaacaaagatttcccctttctctttgttcttttgctccttgtgttgaagaaccctcaaatacattttcagaactcaggagtcaaaaataatcatttttgtttttaatggatcaattgacctctagtagtcatcatttcctattcctactttttttcctcttcagttgaaatgcctaacctggagaaagatgtcccctacctcaacccaaggccctaagcagtctgcttcagtctgacatatggacaaaaatcacagtgaagatgaagtaggaacagagtagtaggtagccacgaccatggaagcagcagagttcggagccagctctatctgtgtgtgttaggacggtggggagctccaaggctaaaatcttctgatggtctaggatcctcttttattcattgccatcatgaaagagagttttaaatgaacccattggctctggatctattgacacaaacaaaatgtttcttgaaataaaacttaggcacagaacttcgagtttccacattgagaaaaatcctaccatagccatcaatttatatacttataaaagataatcggggctcactccccttttcctagctctcatttctctcattggataatgactgataccaactggcagagactgattggcacacacaaacagaatgatggctgagtcaacacaagcgcttacctaccacccctccatgtgtttacgcttaagcatctcaattaactgttcatgttcagtatattttctttattcctggcaaactcagctatgtataagtgaaaagagcaatctaccaaaaataacctaagtgggtcctaatctcctctcaacattttctgtctgactttgggcaagtcttctttctacctgttggccttggttactctctataaaacaggaataatgtcttgcttttctcattaagtcttgtgtctgctctaagttatgtggatgctacaattcaataaatgttaaatgatgctaacagtttgcctcatatccttcaaaagtaccttgaatgcttaggatgaatccaataaataaactaacataaattcgatatctaggagaactgcttaatgaaagagtaactgaagtattgccaagttaattattaccaatcagggtgggtgtgagagatgatttgcttttttcaacttcaatttgagagattgattttatggtttctcaggtctccttcactgttgaaatcctacaaaacaaatggagaatcgataaaagaaaagtgtgctatggcttaagcctgagttcctgttccctccatctttccagtttttccgaaatcagtgttgctatcatggttctgttttgattaaaaatctagatacgcacacacagttttttaaaaataattcaaatatgtgtgggcaatgatattctgctatggtcttttccaagtgctgtgcactatcccagaacattgggaaattctacattcaaatattaaaacagaagacctgcatgaaatgtgcatttacttttatttgagcttatctatttaataaggcatttggtctagaacctctttctgttaccatgcttgaaatttaactaacttgcttcttaagaatgaccataaagggtatgatattgcaaaaaatcacattttatgataattttataataatatagaaaatatggtctgtaccacacaatggcaggctcagtgacagacagtcagtcttcatttatccaggatgattgggaaatgaggtgtctctgctgtgatttgtcctgataactgaggcttattccctttgcatgccaaaaggttttatttaaactaatttcagtagaaagatttctcaaatgtgtcacagtgtccagcctaattaaatatatactgaagctattaacctgttgttaatgagaaactcagcacatggctatcagccatcatacagggccacatcatggtcagaggggagcctgagaggggaaacctcgcttgttcctttgctcagcacccccaacttgttctgctttctgagtcgtgtctgtaataggctttctattccctttctcactattagtggcctttttttttaatcagttttcaatactctcactccaagcaatttttcattcttttaaattcctgtttttaatttgtagaaagcccaataataaagccctgttaggactagatagtaaacaagaatcattccaattggggtacaactaggagtcagtgaggatcaatgagggttcgtgtgcagacaagtagatgttccagctgcctggttttctaccgggacccagagagtgaggttactgagagccttccatccgagcagcaagtactcttattatttttctttgtatttttatctcattatttcactctgatagcttatattacctatgttatatataaagtccttacctacattatatataaagtccttgagggcaggaaacatattttattgttcatctgttttgccacactacctaaaatagtgctgagtacatttaaaaaaaaaaaaaaaaaaaaaaaggccgggcacgctggctcatgcttgtaatcccagcattttgggaggccgaggggcgtggatcacttgaggacaggagttaaagaccagcctggccaacatggtgaaaccccgtctctactaaaaatacaaaacaattagccaggcgtgatggcaggcgcctgtaatcccagctactcaagaggctgaggcaggagaatcgctcaaacccaaaaggtggaggttgcagtgagctgagatcatgccattgcagtccagcctgggcaacgagtgaaactctgtctcaaaaaaaaagaaaaaaaaaaaaaaaaagaatgcttatgtaatttggctatgctatgctttcccccagaaccttagagaaatccacattgaaacgttaattcaatatgatacctatttctgtcatttggcattatttgtgccatacttttcttccaatagcgttgactgacttgccctagactttgctgtaaataaatataaagatttcttgtttaatttgtggtactgtaattggaaactagtctccccctcagctattctctttttttgattagcaatccttgcatagagaatctccagctctaccctaaagcccaactatagtccttatttttcataccttgaaggcccagtaactcatcaatatttcttaagctgtgcctaacttaaactttttggcctatcaaaggatctttcttttttaggatctgtctctctctctttttttttttaatgatgagtagaaaatggccctcagaccagatggattcacagccaaattctaccagaggtacaatgaggagctggtaccattccttctgaaactattccaatcaatagaaaaagagggaatcctctctaactcattttatgaggccagcatcatcctgatactaaagctgggcagagacacaaccaaaaaagagaattttagaccaatatccttgatgaacattgatgcaaaaatcctcaataaaatactggcaaaccgaatccagcagcacatcaaaaagcttatctaccatgatcaagtgggcttcatccctgggatgcaaggctggttcaacatacacaaatcaataaatgtaatgcagcatataaacagaaccaaagacaaaaaccacgtgattatttcaatagatgcagaaaatgcctttgacaaaattcaacaacccttcatgctaaaaactctcaataaattaggtactgatgggacgtatctcaaaataataagagctatctgtgacaaactcacagccaatatcatactgaatgggcaaaaactggaagcattccctttgaaaactggcacaagacagggatgccccctctcaccactcctagtcaacatagtgttggaagttctggccagggcaatcaggcaggagaaggaaataaagggtattcaattaggaaaagaggaagacaaattgtccctgtttgcagatgacatgattgtgtatatctagaaaaccccatcgtctcagcccaaaatctccttaaggtgataagcaacttcagctttgggtatttataatacccaaaggattataaatcatgctgttataaagacacatgcacacatatgtttatcgtggcactattcacaatagcaaagacttggaaccaactcaaatgtccaacaacaatagactggattaagaaaatgtggcacatatacaccaaggaatactatgcagccataaaaaatgatgagtctcaggataccaaatcaaggtacaaaaatcacaagcattcttatacaccaaaaacaaacagagagccaaatcatgagtgaactcccattcacaattgcttcaaagagaataaaatacctaggaatccaacttacaagggatgtgaaggacctcttcaaggagaactacaaaccactgctcaacaaaataaaagaggatacaaacaaatggaagaacattccatgctcatgggtaggaagaatcaatatcgtgaaaatggccatactgcccaaggtaatttatagattcaatgccatccccatcaagctacaaatgactttcttcacagaattggaaaaaactactttatagttcatatggaaccaaaaaagagcccgcattgccaagtcaatcctaagccaaaagaacaaagctgaaggcatcacaatacctgacttcaaactatactacaagtctacagtaaccaaaacagcctggtactggtaccaaaacagagatatagaccaatggaacagaacagagccctcagaaataatgccacatagctacaactatctgatctttgacaaacctgacaaaaacaagaaatggggaaaggattccctattgaataaatggtgctgggaaaactggctagccatatgaagaaagctgaaactggatcccttccttacaccttatacaaaaattaattcaagatggattaaagacttacatgttagacctaaaaccataaaaaccctagaagaaaacctaggcaataccattcaggatataggcatgggcaaagacttcatgtctaaaacaccaaaagtaatggcgacaaaagccaaaattgacaaacgggatctaattaaacaaaagagcttctgtaaagcaaaagaaaccaccatcagcgtgaaaaggcaacctacagaatggaagaattttttcaacctactcatctgacaaagggctaatatccagaatctacagcgaactccaacaaatttacaagaaaaaaacaaacgaccccatcaataagtgggcgaaggatatgaacagacacttctcaaaagaagacatttatgcagccaaaagacacatgaaaagatgctcaccatcactggccatcagagaaatgcaaatcaaaaccacaatgagataccatctcacaccagttagaatggcgatcattaaaaagtcaggaaataacaggtgctggagaggatgtggagaaataggaacacttttacactgttggtgggactgtaaactagttcaaccattgtggaagtcagtgtggtgattcctcaggcatctagaactagaaataccatttgacccagccatcccattcctgggtatatacccaaaggattataaatcatgctgctataaagacacatgcacacatatgtttattgcggcactattcacaatagcaaagacttggaaccaacccaaatgtccaacaatgatagactggattaagaaaatgtggcacatatacaccatggaatactatgcagccataaaaaatgatgagttcatgtcctttgtagggacatggatgaaactggaaaccatcattctcagcaaactatcgcaaggacaaaaaaccaaacaccgcatgttctcactcataggtgggaattgtacaatgagaacacgtggacacaggaaggggaacatgacatacaggggactgttgtggggtggggggaggggggagggatagcattaggagatatagctaatgctaaatgatgagttaatgggtgcagcacaccaacatggcacatgtatacatatgtaacaaacctgcacgttgtgcacatgtaccctaaaatttaaagtacaataataataaaatttaaaaaaaaatggtcctcagaaacaaaagcaaagacaccttgaatatctggcccatttatatatttattctgaattttttatgtaataccgtatgttatttcaattcttctcatcctgcacgtcactacaggaaatcatctttccttatggcgtcaactttctgagcatcaccttcttgatttgcccagaatgtgaaagtgcatgcgctgtcttccacgcagcaaacatttcttgcttctgtctgtaatgttttggttgcttttgaagtcattctctaaacctgtaatgtgtgcaggtcacttgtctgtagacacttggaaagtggggtcactgatctaaagacaatatgctaataccaagctctgctttatacatagtacctgtaaccaaatcctcttgaaaatccatgataccttaagttttatttcaagaaacattttgtttgtgtcagtagatccagagccaacgggtttatttaaaaactctcttttatgatggcagtgaataaaaggggatcctagaccatcagaggattttagcctcggaactccccaccctcctggcagtggtaaggtctattcattttctgatcttattgcaatcattcactggatatctcctttgacatgaccttcttttctcaaagctaactctttaaaaccccttctcatttacttgtgagaaaaaaggtatgaaagtcacctttgtgcttatggcaaacattcatttttcttcacgatgctcttgaaaatccagaatgaccacagcttatcctgatccttcagctgtacactccataagcacaatgtaggattcatacaatatagtcccataggtggctaaatagattttacagtaaaatatgtgtgctgaggagtgaataaaacaaacacatttactgtatgtacatcttagcgggcaataataaaatactcatgtactcaccaaaaacttgagacattcagcattacaaccccgtagcaggctgtgtacccctccccacttgtcaccctttctctttccctagaggtaaccacagtcctgaatcttgtctctgtctctccttctcttttgctgtctccctctccctctctctgtctctcaatctctctttctctcatagtttatcacctttatatggtttcctaaataatatttcatttggtacttgccttttgtatttatgcaagtgaaattctatatgtaattttttgtgataggcttatcacattccatattgcaagattcatctatgttgaagaaaatagctgtagcttgcttgcttgctttttctttctctttttcttttctttctttctctttcttttctttctttctttctctttccttctttctctctctctttctctcttttttttttttttgagatgcagtctcattctgttacccaggctggagtacaatggtgtgatcttagctcactgcaacctccacctcccaggctcaagcaatcctcctgcctcagcctcccaagtagttgggactataggcacacaccaccatgcctagctaattttcatatttttgtagagactgggtttcgccatgttgcccaggttaatcttgaactcctgggctcaagcaatcctcccacctctgcctcccgaagtgctgggataacaggcttgagccactacaccaagacaatagctatatttcattctttttaactatggtatagtattctagtctatgaacataccacaacttaggagtctattaaactgttggtagacaatttgaatagtttcctgttttctgctattatgaacaatgctgcttggacaatcttgaattttctggtgtacacatgctagaattcctcaagggcatatatctgggagcgtaggtatgattgtagggaattttcatccacatctctactctatttagacacactgctttccagttctactagtttatactcttgtccgcaagagatgactattcctattgcccatatcctcactacacttgatattaatcaccttttaattttttaataaactggtaggcatgaaatgatatcctattgagatttaatttagcatttccctgcttaacaataaggttgagcatcttgtcttatgtttatggtaattcgtatttcctcctctgtaagatgtatgtttaagttttttgttcttagtttcattgtggtgttcatcttttcgaacacaaatctttactcattgacatggaccgcaaatcacttatttcagtatgtctttctcttcattgtctgtaaggtgtttttattctataaatgaaagctttaaattgtaatgtacatacattttatcaacaatttcctttggactttgtaatttgcttaagaaactattttacttcaaattcatatgactattccaaatattcttagaagttttgaaatactgccttttacatttacatctttcatccgcttggaattgtagtttatagtttgtaatacaaaactgttttttttttatttttcatttgtataatcaatagtccaagcaccatttataaaatagttgattctttcctcactgatctaaaatggctgaactgacataaattaagtttcatgtatgctgtgggcctgtttctgaggtccctgtttagttgaattgacactgattaaatccctgtagcaataacaccttgttataattacaatagctttaaactaaaattaaatctggtagaacaagtccctttccttatatgaaaacattgttcttcagaaatgtttgaactaacttttgattaggtatttaatttgagatgtttcctccttttaatataggtgttcagagctataaatttccccttaagcatttcttatgcaagatgaacactttagattcgaagacaaaaataggttgaaagtaaaatattggggaaagatataccattccaacagtaatcaaaaaagaagtgaagtaactatatttatataagacaaaatagatttcaagacaaaaattattactatagacaaagatattttataatgatgaaagggccaatccaccaagaagataaaacaattataaacccatatgcacttaacagaagggcccaagaaaacatgaagcaaaattgacagaattgaagggagaaatacattaattcaatactctaatctcaataatggatagaacaactagacagaagatcaacaggaaatagaagacttgagcaacagtataaacaaactgggccttgcagcagctgcagaacactccatgaaacaacagaatacacgtccatctcaagtgcacattgaaccttccccaggatggaacgtaggttaggccataaaagacgtctcagtaaatttaaaaggactaaaatagtacaagtatgttcctagaccataatgggaaaaaaatcagtaacacaaggaaatttaggaagtaggaaattcacagatagtggaaattaaacacacaatattaaataaccagtgggccaaaaaagaactcacaaagaaaatttaaaaatacataagagttttttaaaaagtgctatggcaacgtaagtttcacatgcaaaagaatgaagttggttccctatgtcatattatgtacaaaaattaactcaaaatcgataaaatatctaaatataaaggctgagattataaaactcttagaagaaaacataggtgtaaaatcttcatgactttggattaggcaatggttcttaaatatgacaccaaaagcacaagcaataaaataaaaaaataagtacattggacttcattacaattaaaacttttgtgctgcaaatgaatacagtaaaaaagaaacctaaagaataggatagcttatttgtaaatcatatatcttgttcagctctcatatccagaatatgtaaagaattcttataattcaataacaaaaacacaaataacacaatttaaaaaatgggcaaaagatttgaacagacatttctacaaatatatatatatatgcaaatggaccaataagcacatgaaatggtgttgaacgtcgattgtccttagagaaatgcaaagctacagtgagatactacttcacactcacaagcctggctataataaaaaaagacaggaaaaataaccacaggcggtgttgaagatgtgaagaaactgggaccctcatacattgttcggggggaatgtaaaatgatgcaactgctttggaaaacagttcagcagtttctaaaaaagttaaacataaaattacctttaagattcagcaattctactcctagatatacacccaagacaactgggtatatataaacttatatttcctttatgcccacatacacccttagatatatgtagatataaatatatgcctaaacaaaatcttgtatatggatgttgctaaaagcattattcatggtagctaaaaaatagaaacaatccaaatatccatcagctgaagaataaagaaaatgtggtatatttatatgataaaatattatttgaacgtaaaaaagaatgaaggactgatacatacaataatatggatgaagcttgaagacattatactaagtaacgaaattggtcccaaaaggccacatattgtgtgattccatttgtacgaaatgagaaatttctatggatcttttatgtttccttgaaaattatatgtattctacaactgttggatacagtgtcctataaatgtctatcaggttccattcaaatcttctacagttttactaagtttttaatgtgcttgatctaccaatgaaagacaaatgtttagatctcccattttgatagtgaaattgtcactttctccttgtagtcctattaattttcattgtatatgcttgaggctattgggtccatacaagtttagaattattacatcttcctagaaaatagaatattttatcattatttaatcagcatctttatctctagtaatatttctttccttaaaatatattttgccagatattaatataattacatcaactagctgtaattatatatattttcaactaacattgtaagcttattaaaggattcctttacattcaatgtgaaataattgattaccttaataagaacaatttggaggattttaaattttataaagtgccttttcatgtggccttttgctttttcactaaggtatttcattcaaaagcatctgatgttgctgtcagtttctcaaaacatctgacagttgtaagttgctaaccaacatacaatcatgtccatgtcatgagttatgtcaaatgataccaaaatatgctgacttaattaccaacacacaaagaaccttcttaattaatcagctgatatgatggacaattacactgttttagaagttagaattacatagtcataaaactaggtttaaatattttctctgctctgtaatatataaaatgggctttgacatgacattaaagtaagtctttttttaaaccaatgcttgctctggattatatttactctgcaaaatataaaccttctttatcaataacttcaatccatcaatttatctcactacttttcttttcattgcctgctctcgttgacctgtattttctctgcaatttcaaggacagtgccataacaacagcaataatacctttcatctcatatagttctttgaagtgtaaaaagcatttgtaggcatattagtaggtgctcaataactagttgttgaactgaattatcctgcttcttcatgattaccaaataggaatttaacaatgacataatcaagaatgttctttgtgtggcgctgaatgtcctggaagctgagtgtgttcccaatctctatgactgtgtctccagccttatgcacttaaaatgtctactgcaatttccttcattattatgtactaagaatgcagccaagaaagactgctcacctctatgaagtatacctaagccaaggatgttaaattccatccttaccatcaaatatagattttctatgaaaaggtcaatccatttttaaaagctgaatggataactggaaagtaatttacagctgattaatatttagggaccaaaaaatccagtacaagaatatttcccagatttattgaactttgattatgacttgattgaattttcatttttttcattcactcagttcttacctttttttggttctgaactagtcagtggaatgtcactggccatgttgagcttcgtaattctgctacctttattgaattaatctatttctatggcaagactgccagcttgagatagtcttttgcctgctgagccatttgcagtgatggatgacacaaggaatagtaacactttccaatttggcatcttttaggcattaactgggtcttttattacacatcctttcagtcttactcttatttttctttgaattcattgacttctagacaagaaaatgacacatttccttaaggaatcccctttagctagcagttgatgtcattttaaaaagaactttttagaaaagacagaagtgactcttaaaacttaatgttcttcctttggaaataaggtgaaaattttgttaaaataggtgaacaagtatttgtttacctaataatagaatatattgtatagagagaaccacctgaagcttgaaattggtattttatgaaaattaagagagagtaatatttaataatttacaacatttgtagtaactttatgtgtaagcaatgagtattgctgtttgaatgatattttcacttctctccttccatatgcaggacagatttatagttcctgacccccttatggttgagtggggttattcagctagttccacctactgaattgtctgattatgagtgtgtcatttctgagctgcgtcatgcaatgtgagatcctcaagggttctcttttccctctggctggcaactgacaatgtttgagacaatgactatcttgtcagtcagtctgattcaccaagtcactacttcaaggaatccacctctgctgatttgcaatggacgggtagcatgccaagaaacaatcctttgttacctaaactactgggatttggggtttatttgttactgcagcataaactagttttatactttattttaaagatactatggaatttgcattagcccacgatagtgtctagttaaatttagagatgaaccatccgtgacaggctcttaaagatttctaactttataaggttgttaataaattctttaagtttgaggttgttaataaggactaccatattttctcactaattctgcctagcattgctgaacagtcatataccaaacgttccggatgtaagtaaaccatgaacattttgaacttttgagaagcaatgcagccagatttgttaaatcatgaatttaggaacatcagttttatttctgactgcatttttattaacacttctgtaactgcttgaagccttggttttctcatctgtgaaatgaaaatgataatatttccatgtgatggttatggaaaaaacaccagtgagaacaccataaccctcttataaaaaaggagtaagtgtttgttccagtgctgggcctcgaggaagtgctcagtaaatcctgcctctcctcctgttttgaagggataatgacacaaattcaaacctcttaccaacattatagggaagctactccacacaccacccactttttttctcttttctgttctaactgattctttctggttctgctttatttttcataagaaaaatcagcctgagtcacaaactatggcgtttgtgccaccaagtcataggtaagaggagcacggtgataatgacagcagccctgtctcatgtgttgtgtgcctggtctttgctgtaggcactttccacaagtttttctccttacaacagcccagtaaggtggacatttttctgctcattttgcaaatgagaagattaacagtagatatttggataaggttatgtatctgttaattgatgctatcagaatttgatccaagatgtctgaagattgtgctcttcaccaccaaataggggaagcatatacccaggtttgcctgcagcagtctctatgtatgactagtatcctggcattccatctggtttaccatttgtcttagatttttcatctttacaaatgtattattattaatagttgcattaaaacatgccaggtgatacagtttggctgtgtccccacccaaatctcatcttgaattcccatgtattgtgggagggacccaatgggaggtaattgaatcacagggacaggtctttcccatgctgttctcgtgataatgagtaagtctcatgagatctgatggttctatcggtgggagtttccctgcacaagctctctttctttgcctgctgccatccatgtaaaacatgacttttgccttctgccatgattatgaggtttccccagccacgtggaactgtaagtccattaaacctctttctttcgtaaattgcccagtctctggtatgtctttatcagcagcgtgaaaacagactaatacaccagatttctaggcttccacttcactgccagcctctgccatggtttcacctagtctcagtgcaaaatgcacaggccataaacagagttcttaatttaacatgtggtcatatttgaaaaacaaccaaagatcacctttctttcttctcctgaccctttctggaggcaatgtaactagtacctttttaaaggaaatgaagagactttgtaccctagggtctgggaagaagctacatccttctagtctgtggtggtaatggtggcagaagtgtccaacaggcctacccctatcaatcaaatggagctggcatgcaggtggtagcatggcctgtgctacagcctacaagatgcatgaaacatcaaaccaggctgcaaagtcaggaaagcttggaaatggtagattcggtatatataaaacatgtgggaataaaaactgagagttctttcacagagcatatagagaatacttcctagtacagtggtttttgtcatttattatatactataaatcaataactttttatttatgttattatttggtagctttttaaaaactttataactcttttcaggagcaataaattctaaggggaggggaagcacatgtttaataaaattttaagtacagaatttctattttgtaagaaaattgacaaatatgtaacttacacaaaatgtttgctggcatttgacatctaacttggggactgtaatgatattaattatcatttgaaaaggcacaagtctactaaagaaacatcagcatccatttcaaaagctagtagttactttgtgcaggttttcttgaaagtaatgatttactgaaacttatcactaaacatattaaaacaccaaaagaggaaagaacaaataaaaggttgaaccctcaagggagtgctgtgtttaatatttaaatttagaatactataaatgcactttagagtatctcaacttgtggtgtaattttttttgatggaactgctatttttaatcaggtgaacttatattctgactagaaaggagtgaaaataagaatgcttatgattttccagcatctgaatttagagaaacagtcaaaggaatcatagatacaacttagttgaaaaactttgattaaaatatttttcaaagaaagatatggaggtaaaaagagagtatgtgtgaaaaatatttgagctacgtacacatttttatttttaaaatggaattaaatttgaaacgatcagcatatttaatttactcatccatgtactataatatttttagttaagtaagtatgctcttttcagatactaaagtacctggaaaactaaaaaaaaaaaaaaatgctactacatggtggatattttcattagccgtaaactacttagagtaagactgcaggcaattttatgaaagaaattttaatgacactatgttgaaaaaaatatcagacaaatggcattagaaacaaatatagcaaagaaattgattaacgtatgtgaagtgtatcaagactattattgtttatgttatttttaatgtttcagataattgatgtaataatcaaagtgaagatttttattttgcttaaatgtaaatgcatatgcgttattttcatttttaggaaaaaattatttttgaaaatggtttttaacagaactagtttataaatacaaatgtattttataaaaacaattgtattcattaacaaatgaatattccaaaaagcataattttaattttcaagtgtggccttgcagtctaacaattatttagctacttgtcccaaacggggagtctgtatgcacagcctgcagggtatggtaagtgacactctttgttttcatctcagttccctggatatggaaggccagcttcatccaaggcaccatggtgaattctttggacagttgttttaagtaaaaaattgaacataattattctgctgcccctcctaattttaaagggaagtgtctttcttttgggttctttttgattcaccagcatcaaggattccaggacacagcagtcacctgagagctatggctgataaatgtcttcattgcctcagagaattgttctggggccgtgacgctctccagcattgcctgaattccaaacggaactacatgcctttgtgactttgaagattaatctctgtcactcacagctcgttggcttcccttgctcatttctgcaatgtctgcagatggtgtggtgctctgtgccagagttatttacccacaagttccttcacacatagctccctctttgagccattccagggagagttaaatactgaacaattacgcaactcttttgtcaacccgtgggtctttccagctctggtccaaaagaaagtctctgcagcaatacctgctattcctggaggctgctgctgtctctcaactgaatgcagcagagacattgccttcaagaaccctctcaccacaaaaataaacattttcaaaatatacacaaacaacacatttttcattggtaaacattccttaacacacttcccagagtgcctgctgcttcactgcatttttctcccagaactcaagttgcagaattcatcatcctctagctttttattaatttacaagtcagcaaatattttggcactgagtaccaaacctttgtcagaaagatgtaaggtggaagggaaagatggaaaaaggaacagggaaaaatagtaactgtggaggtaagttctttatattcgttttttaatttttccataaccactatgagtaagtatttttattatcctattttacatatgtaggagactgagactcaaagagattaaataatttacacaaagtcacatccccagtaatgacggaacagagacttgaatccaggcagtttacatttaaagcctgcaattataacccctaaactatatctcttcacactgtagagaaagtagaagcagaagaaagaggagaaaaaagaaaatatggggaaagggatgggaaagaggtgaaggcaagtggaaagaagaaaagtgaaaggtggtgatcagaggagtgaggaggaataaagaagaaaacactggtgagagggaggaaaagagagctgagagagagagagaagatgggaacaaggagaggaagaggcaaagggggagagagaggggacagagggagagacagagaggagagagagagaaaaaaagagagaaggggccgggagaggagcatatgcagtgagtaataatcccaagactttctatggttcatatcttgggtaatctgtgccttgataaatctgaaataagtataacaattttttaaaagccatcatctttttaacgactttatttatttatttatttatttttgtactttaagagtcattaccattgattcactagaggaaacttcaagtattagaaggacactggctttcaaatcagtaaggttcaatttcctcttctggaaattagaaataaatactcactgacctcatatatcattataaataagttctgtcagtaaagcattggaaattgcatatcaacttcctttgcactgagtaccatcactttggtcatggacctaaggcacagaaagggagaattgggaaaaagaataagaagaaatggtaataacaaatagctggcattgagcacttgttatgtgtcaaggactgtgtgtactaccactgtgcactcgggaagtttaagttctcttgctctctcctctcaaataaaagcaagcgctggctagtacttctagacctagacttcctaaaccccagccaagaggtagaatataaagtagcggttatgagaataggcccagagcattactgtgtttaattgccgttcctccattgagctcattattctcatgaccccctagatgcattctctgctttgtgctgaactctatgaactgcaccccttggctgcttcctcttcctagatcgctgtgagacacaagctctcctctctcctcacttcctcacaactacccaagacaaggttgatttgggcaggaaaggacttcctttccttaaagctatagctcccatcgagggatttctctcacacagttagttgttgctgtttcagtaacactgtttctagggatgctaaaggattctaattgttgctcatctttggagactttggaactatgtcttgttggttcccttaatcctacccttgtctccataaataatcctatcattaaactgtttcaattatcttttaagaatttgccatctgtttctatcaccactccttccgacacagatgtgaactgtctgtgggatcttagataagttccctagcatcgccagcctcagtttcatcatctatatactgggggtgttgtacttcatggggaagatctgaagagtgaataaaagtgcctgtgctttgttgcttaacttcttgccaggcacatacacagtagtagtatttacaacctacttagaaaatatgaatgcatataaggtcagacttaaacgtgaattaccccccatcccccaccactacacacacagatctttaccccaggaagttctccgtagtatccaaaatgcaagtgattatcttcatatcatggtctctggtagttcctgccttattctatttctagtggttctaggattttcagcattttcatggagcttgtgaaactcagaagataaaacagaaagccatgtaagtatatgtgggatcagtctaccttcctggaagacagaagactggccctttatacaactagacagaagctaatctaaatcctagtgggttctgccagaacccaaggatccccaaaaccatccttttaattcaaggaataaatcccaacagtatccaatggtctggtcctcataattatcacatttcttagacatatcagatataggaacaccccactgctctaccattgctctgtgtctggggattgcaaataggtttctttttaagtgccaacttggatcaattggcagtgttgcctgaagtgctgggtggagaaaaattctcaggccaagtgcaggctcagcagtaaaaataagcattgtgattgattaacaatgtctgctatggacgcggggtgagggggagaactcccacacttgctgcatgtttgctgaccatgcattataatgtgaagggattttctggaagaaagtagaatggggtggtggcatcccagtgactttcaggcatcaggcctgaaaatattctttttgcacccttctcttgtagaatctatttcaaataaaaggtaatgactgagattacagatacattttctcatttagacctttcatttttatgcgcatttgcattcagcagtaaaattataacacatatttggtatctgttgtaagcatctggggatggtttatattatagagattcaagaagtagagctctctactggacagtgattcagtcagatatgttcaacatagctcactgagctcatctcatcaatgatatgttcacgcagctaaaggcaaatgtttaaacatttagttaatgcaccatatgtcttaaatgttttagttccatctgacattttaaaaaatccattttagtggaaacccgccaagtaaatttacttctctggaagatgattattccattcatcttaaatccaattctcctggacctctcaaacacaatgaactcttaatttgtaggcttctaatccaaagacaggactgtcttcatgttctgcctcctgaagtgtggggaaatgcctgatcaggtggttccatgtaatatagtttatgtcctgagggccacacagctaggtgtaggcaaaggtggctccagaaaactaattatcaactctgggggctcagcagggtggtaagtgaaaggcaaaatggaggactatgaaaataaaaggaacaaagtcagagaaacatgagaatcagagtaggaaaaacaagaacaaaagacaaaggcaaataatgaacatttacaacaggatgtggttataactcttatgtttcaagtcacacactcctagcaattaaaaacaatacagagggtaaaaataataaccatagaactgtgaggcttaggcatagtggttagaaacacaaaccttgatatcaaataaattaaagtctcaaatcttggctctaccaattactagctgtgaccttaggcaaattatttcatctctctgagcctactttcctcacagggttgattaaaatattaaacttgtatagtgggtgagtataaaactcagatttgcaaaaaaaggtaacttaatttttaataagtaaattcaatttcatgtgtaaactcctagtctgcccatagcttaaaatatattttatcacattgcagtatactcaatttgtattcagtgatttttataaagccacttaaagtatcattctatcagtctttatcccgttccaatcttagacatttttgggtaagaattaatcatttctaaggcttcccctactgcgcctcaccatctacctgatggtaagtcggtagagaggagaggaatgtcatataatgtcctagcctctaacccttgctggtcttcagttgagagaactcattctgcttggcctttggccaccagcctttgtcctttttcatctcttctggtgaagttactctcaccaagccctggacatcttgagttggcatccattcaaatcaagcaggtcccacttgacctttgtgatggtttgctgcgactcctagctaatgcctctggtctaaaggtccttgcctttagctttgttgtcctgatctcagacctcttgctgtccatcagtcctctctataattctgtgaactttgattttcagaatccaggattttgatgaggtatattatttgaactcgaaaagctgagctttacaaattaagaggcaaggggttttatttagcatgagtcttgatgtgtggaagagtgagaattggactgaagggcagtttttgtccctagggctagaatggaagatcagcagatggagcctaagatggggagaagcaaaattgagatgcagaaaagtgaacttattttcccatccccttccagttaatgttgggggttggtgggggctggatctagacactgatagttagggtcagggaatatcaaaactaggtgcttattccttgcctccccagagctcatgcctttcagagatgacttgaatctccatggcagcaaggccaacatggtgtagatgctggaatagaaatgaatgaggaacgtgccagatggaaggacttgagagagcattctcccaccccctgccctccactcagcctttatcccattccctgtgatctgtggggaatttgaagtttccaggagcctagaaatggaacaggagatacagccagccccaaagaatcagcagctccagggatagcaaaggtgagactcaagtccaccatagagaaatcaccaggccttaaatgagatgtgcaaacaagtgaccctgctgtagacacattagcaagggctacagcatgagccctttccgaggagaaggccagagggacctcaggccccaacacctcaagaagcagatattcctctgctcccagggcctgtctggggaagagaggggaattaacaatccatacagccctccattttaagccagaaagctgagaacactttaattgttaagaacaaatattttccccatcagtagggtgggagagcacgaggtaaagtcagagaaaataattgaccgacttacggaaaataaaggaagactaggggaggagttagttcttatatttgtttttactgtgtgtactagcctgctcaggctgccgtaacagaataccacagacttttccaaggtggcttagaaaacagaattttatcttctcacagttatagaggctcaaaattccagatcaaaatgctgtcaggattggtttctgatgaggcctttctccttggtttggagatggcgccttctgtttgtgtcctcatgtggcttctctctatgtgcacagagagacagagagagctctggtgtcccttcctcatctcataaggacacctgtcctctcagattagagccctacccttatgaccccactgaattccaaatacagtcacatggagggttagggctataatatatacattatggagggaaaaatttctagccataacagtgtatgaacttaacttgaaacaaaaattttttgtctatattatgcacgtaaacaccttagtccagcacttggacttaataagtgcttaacaagagggaaatgtaacaataatactgttataataataaaattagctaatttgtaatatgtgccaggcatttttatgtgctttgtgtgtactactgcattgactctaacaacaatttataagagatatactattactctctgcctttactcctctcggttctcctcgaaaaataatctcccaccccatacccaaagcttggccttatagttttgataatccaaaactgtgtgtctttcttgggacagtagcttaattggaaactatgaggatttggctttcttcctcttcatttcctctggcttagtaaggtgataccttcagtcacttctgacaccaagaaatgtcagtcatgcttctggtactcactgaaggcacaataacaactgcttggaccaatgaaggccttgccactgattccaccatcactgaggatacagagcaacaaggtcactgagacaaccatgttcctgtcaccaccaatgttactgtagctatgccaatcctgctgcttgtccaagccatgccatcctgttagcacccaagccaatgacccttcagatcataccactgctgggagttcattcattgtgctctgcccgtaaatatccatcccttctaaacttctgcatctttcctacccttggatctccccatcctcaatgtttatgctgatatttctgaatcttatgatgaatatagcttgggctccacataaagaaaacaaatggagacccataaaatacaagaataagaacaacatccaaaacggattaggcaaggactaaggttggaggtgcaaagcataaaataaaaaacaattttggattaagggatatgttgtagatgaaatcacccaccaccgtgaatgtttttcttgaaacttaatcccaatgtacatcatctcttttgtgttcagtgggtaatacctctagagatttttcctgccattctcacaaaatttttcaggaaaaatataccttaaatattaagtaaaagtaatcctatgcacagattccactacctttattttttagctttatttgatataaagctgccatttttctctgaacacaccaaagccctgagtttagggagagaaataaatctgcagttcatcttcccgaaatgttattttggagcaactccattagatgcttcctagataaagcaatcaacctggagaggattgaggggcccatacactaaaaagtgatatataattattaccatacctattaagtgaataaaccagccagagcccaattacatcgttgcaacatacaatgaaatatctcttaaacaattcttcaatgaagaaataaacctgtcacggaagaaaaatgtgctgtacatcaaggctatgtattgaggaagtaatgttgctgtcagggtcgcgctggctgtaactcaatgtgcaattaaaggaaattagaagcaatcctcattacatacattttacactttgtttactgtgctacaaattctgtagtggaaccactgacttgtagcaacaatagctcatttaatggaaaatgagaatgtttaacaaaggatatttgatggctgaggagcagaatacaccaatttacatttcttgccatgtgtcccttctttaaaaccacatctttggatagagctgggcataatgtagccacaaccaaagccaatatgacatatctgaaattctgcttgataagagaaaaaaaaaaaacattaaacaggaaagaaaagtgtattgtattagtccatttttacactgctataaagaactacctgagactgggtaatttataaagaaaagaggatgaattgacttacagttctgcatggctggggaggcctccagggaaacttataatcatggcagaagtcaaagggaaagcaaggcacgtcttacatggtagcaggatagagagagcgaggagggaagtgccacacactttcaaacaaccagatttcctgagaactcactgactatcagcagaacagcaagggggaagtccacccccatgattcagtcacctaacaccaggcctctctcctgatgtgagaattacaattcgagatgagatttgggtaggaacacagagccaaaccatattatgtatcgatgatttttagctcaaagaatacattttcaatcaatcattttacaaagaatcggaaagagaggagggaacaaaagggtctgagacagcaaccttgggctgaaactcattaagaagaaaatgctggtctataaagattacctttgaaagctccccagtcccctcagaaaatatttgttgaaaaattgctaaatcttaaattctgacatattcagtctgaaaactccacatttgcctgtaaccattatttctacaaacttccgtcattcatttgcaggcaatgctaaaaggtggaactttgaaaggatgaattgcagagcaacagcgtggtaatcagatggcctccctgatgggaaccttggcttgggggaaggagtggaaattggccacatagagtcactagctggtaagcattttagcctggctcttgggtactgggtcactttgtggacctccaacagaaagtgagtgttgtattttacaaattagaaattattcatggcttcttttaaactcattttgactttggaggggagttcagatgtgtggcagtagcgacagtattggcagcagagaaatgggaccacatgggctttggagagcctcttacaagaagtaagatccaggaatattgttgcatgaaggctctgcctctgaatcatttgagttcttttcctccttggagcttttataatccctgacatcttgaccacgaactctccccaaatgaaacaggcatttgcatatttgatgctaattatctatgtaatcagagtacagttaacattagtttaagaaaaattaagaatggcccaatgacattggaacatcttttgctcattcgctgtagaatctttccaaaaaagggtgcctggagtctgaagtttggcagatgtttattgttgggagggtcgtcaggaggacaggaaaagctgcagagaaagagtaaaatgcctaaatcgtttgccaggatgcttaaggagggcaggttctgcttctgagcaattagaggcatccgctgaagtcagaactctggcaagctggaaaggaggagctatttaaaattttgcttctcttccacagggagaaaagagactgtcgcatccttaacccatcccagatgtcacaaaaatatttataaagtaataattttaaaattgtgtgttctcagacttctcttatgctccttttctaaaagtggttttgcattgctggaaaacattttctgttggtacttccatgtctaatcctaaatgggtctttgattcattgaacactatagggaaaagttggtgcctaaggttgctgaaaggactaagttgatgaaggtttcagggatttggtttcaaacttacttatgctttttgggggaaaggatttagtaaacattgtctgcaaatataattctgaagtttttttcctgtagtccctcatggtggttgtggcatagacccaagacctgtgagaggaaaaactcactcatttacccattcaatgccatgcatttgttcatttattcaacaagtgattataaatgattggtgagcatctactacgaatgcagcacaggctgtagttggtagagaattggccaaacctgtagaaggcttacagcctcctagctggtattattaccatatagtcatattatatctattttaggaggattgcctaaaatgaagtaaaaaattcttaggtttactaccacctgcattgtcaaatcaaaacacaaagattgcccaagctgataaaacacataatcaaagctgagtttattgcttgccaagcaagagagagccaattcactcaaaagtcagtgcagccaattactctgaattaaaaccagaagggcaagaaaattgggtaaaaacggagttttaggcaaataaggctgaatccagaaaggtatcatttgcatggttaaggagagggtagtgaggtttccttgagattgagcattctctatgtataaaagctcaggcgtggtttgcaggcagattaggaatgggctcacagtgctctagtgggttcaggatcacagagcaagcaaattcatatgtatattctcaaagtttggtataacttttctttaacagggtcatatttttgccttaactgtatcttaccttgacctatctgaagtttctgggaaatgttcctagctcttgctgttagacacacgcacatgtccgggcagagttggaggccatttttcagagtccgttttaattgctatggtctaaatgtttgtgtcccctcagagtttatatgttgaaatcctaaaccccaaggtgatggcattaggaagtgaggcctttaggaatctccaccacaatgaatgagtggggttagtgcccttatcaaagagacctcagagaactggctagcatcttctaccatatgaggacacagctagaaggtgccatctgtgaactggaaagctaccctcaccaaacaccaaatcagctagcaccttgatcttggacttcccatcctccagaactatgagaaataatttttttgtttataaaatacccagtttatggtactttgtcatagcaggctgaacatattaaaacaccaatttttcttccagagtgagaattcttttcacatctttctgtaaaatgcttatctgctcttcagtggttatgtaaggctccatttaaactctaacaactcattgtcagagatcttccttataatgaactgataccatatttccttaataagccattagaacaactggaatatacttttttgtgctgtgctttctgccaagagctttaggtgcatttaatcatcacaataaccaagcactataggtcttattattatccccatttcaaataataatgataactggcatttattgaggccttactatgtgccaaatactttatgggttgaatcacactttgttctcacatggatactagctttatccaaggagagtatcaagttttttttctatttatattacctttgttgacctctttgcctttagcaacacatgaagcttcatttttaagggaatatgtttttaggaacgactggtttccatccctagattacaactactaactcagagaccattatcttaaaagtactatttgatactctataccttacacaaatatctttaccttatactttcccttaactaacataactgcaaggcaaaaaccaattccactgctactccatgaaaagtcccaccgttccttcctaagatgtttaatctgaacatccctgtttcctattttcaatccaatccttacatgactatcaaattctagattcatcttttccttatttacaaaataattgcttctagtgctgggtacagtgactcatgcctgtaattccagcattttgggaggctggggtgacaggattgtttgaggccaggagtttgagactagcctgggcaacataatgagatgctgcctctaaaaataataataattaattatccaggcatggtggtgcatgcctgtagtcctatcttctcaggaggctgaggcacgaagatcacccgagcccaggaatttgaggttgcaatgagctatgatcatgtcattgcacaccagtctaggcaaaagagtgagaccttgtctctaatcatgataataataacagcttctgattttttgaggatgctaccattgacactacaatttttccagggaaaatatttttaaacacatgtatgtacatggtaaataaattaaataccagcatcattaaataccctgcaagaggaaataaatctaattaagttatttttgctgtttctcacagttctggaggctgtgaagtccaagatcaaagtgctggaagatttgttgtctggtgcccattcctcatagacagtgccttctagctgtatcctcacatggtaaagagctaactagctagctctctgaggtctcttttataagggcaccaatcccaatcatgagggtgaagcctcccaaaggcctcatgtcctcataccatcactttgggggttaagatttcaacatatgaattttgaggggatacaaacattctgacgatagcaatcacctccaaagatgtaagtgaataaacctccagataatttcagccttcatctttcatgtcactccaagtcttcaggtcttcccaagtaaggggccagacatcatggagcaatgaccagccactcctgctttgtcctgccttaattcctgatccacagaatccaaaagaaaaataaaatggtcatctttttccattaagttctgaagtgctttgcattactctattactgtagctcaataatagtagctaggacaggaattactccttctgcggggatagatgttgctttgccatatcatcattcatggttactgctcccatcctagaaaatcatccctacccagagccattggagaagcaaataaaggcaggcatcatagtaacccctggaataagaggcttacccaggttgtaacaccgagagcaaacctaatttgagggtagggaaaggatgaatggatgggctcacagccaatccttgacgccactccttgcctccttccctctctgttccactgccttgaattcacactacttttcttaacaccttattaagggaatccaaataattatctttttaacatgtttcatttttaaaaaagttttaaacatttcccttttgtagaatatgcttctacctggaagtacagcaccttggtggccctctcaaggatgctctaaaagcctcttccagtggacagaagtgaggaaagtcacagattcagctgcctgctctgttcccactcctatggagaacacatggctgagagtaggtgctcagtaaatatttgctgactggatgaatggtcaaggcattcctttgtttgcactgatgttctctttctggctcttctgaaaagcacagagaaaagagaaagactggagaggtcaatgcattcaccaagccacagtctggagaacgctcttgtcttttggtgtcatctatgcttccagagaagactttggtgtcggaggctgagctgtcggggcagggatctggttagtgctaagctgtcttctgggagagccctttctgctctgtcacagctggagtgcagctgctggccagagagctgatttcctgacagcactgggatttggaaatccctgcatttcgcatacgtacccgccagctggtcttatccaaccctttcccctttggaaggaagcagtttgacttctggtagaaacctgcagacttgacaaagacaagagcttgttgtatggttttagcatatacattccttggaggactctttgagttatgtttacatagaggtccttgactgctagacagaacgaatcacttgtaactcagtatgctaaacagtcttgaaacctttctctctctcatcaccactattggcatgaaagtctctgattagaaagcagtattccttccgtactattcctatcactataaaaacagccatagtccctgccctttaagtattgcacagtatgcacttaataagttcctcatgttgattgacaatctttcatggacacagcagaaaaggatagaagattttaatcaatacctttaattttttcattgagaaactacatgagttataaatgaagatgtgatggttccctgagaggtggaagaaatggaaatattgacaataccatgttaactgtggtattgttttcagtgagaagaggatgataccatttgtcttgatttgtgtacaacaaggactagtggttttttgtgactgacctcaaagtagagtgaccaaccatcccaatttgctcagaacggtcctcatgtaagcattgaaagtcccacatcccaagtaacccctgagtcccagataaatcaagacactcagtcaccctatacatcaggaaacttccctggcaaaaataggtcccccaccagcctgttaatcaaaaaatcttctaaaatttattcactttgcttttaaaggcaaaaatttctaaaagaagggacattaaaatctaagcacagatacttatcaaatcagcacactttattcattgattcaacaaatatttattgagcacctatttacacaggatgaagtactaaggatgtgaacataaataagccacagtgccagaccttaaagcatttacagtctagtgggcaagaaaagcaaataaatgggcattaacagtggagcatgatagttccatacatttgtgatagacacaatcactctggagcaatacagaagggcagctatctggccttggggaacaggtgtctggatgaggtgacatctgagacctgggttaaccagaaattaatgaggcgaaaggcagggtcagggaagagatattccctggagagggaagagtagggacaacagactcaagggaaaaagagatcattgttttgccatcataggaatcacaagttaataggacaaaggaaacactggttttcttggcttggggtacaacagaaaccagtgtgggggctaatggaaaactccccgccttcaccatctgaaggtacactgaaaatcaactaatcaaaggcagattcgtagaagaaatagaatacaaatttattagcgtacatgggggagaatcacagagtgactgccccaccaaagaatggggttatatacttttattctagggggcgagaaacatgggaagtgtggataattttagggggatagtaaatgatttttaagggaattcaatggcttaaagaacatacaatgtcctggaacaaagttgttcgacccacagagcagataatggctgtggcaaaaaaatttgttcaggtatgttgatagacagtctttcttcctgtgaagtgagttcatttaatggaaacgccaagagaccaaaagtaattgttcaaaatttcttctttgagggttctggacttttatctaggaacttcagataacaattttatcctttgttttgggagagacagaagactgaggggcagggtggcgggggtggaggcccaaaatacctagagacttcatttcagcaggtcaaagcacgacattttggggtatcgatttctgagccccaataccattttgcataggatcagactttttgattactttttaaattgtaaatatgttggctgggcacagcagcttacacctgtaatcccagcactctggggggccaagataggagggtcacttgagcccaggagtttgagaccagcctggacaacatagcaagaccccatctctacaaaaactaaaaaaaattagcctggtatggtggcttgcacctatagtcccagctacttggaaagctgagggaggaagttgtcctgagccaaggagatcagggctgcaatgagctacgattgtgccactccactgtagcttgggcaacagagcaagatgccatttcaatcaatcagtcaataatttcaacactccatgaatatgattcctggtttttcctggaggaaaagtcaatattggccttgagagagagagactatttgccacccagcattcaaatttctcagtttttgtctttgttctgttgactcaggaaggtaaactgaggcagcaactcatcattaccacctcgcctcattctcctcctacttcctcagcatttgggaacagtctctggagttaagtcttgggttatgtctctacagaatgaataaagaactcttctgtgttttgtttatcagagccttggcattgcttatagatttttgtttctactaggactcacagtactttacaggtataataataaaataaaaatcaatcatcaaaattagaacaaatattcaagctagcaaacactaaaatgagacttttcttagtattttattcttaaaagtaacacattgttatgaaaaatttaaacagtaaagaaaattaattaaataccaagtctgtctactctctatccctcctgcacccaaccactccccaaaattccatttgttgacagtttactatatatctttctataattttttttttttttttttgagacagagtcttgctctgtcacctaggctggagtgcagtggcacaatctcggctcactgcaacctctgcctcccaggttcacgccattctcctgcctcagcctcccaagtagctgggactacaggcacctgccaccatgcctggctaattttttgtatttttagtagagacagggtttcatcatgttagccaggatggtctcgatctcctgaccttgggatctgcccgccttggcctcccaaagtgctgggattacaggcatgagccaccacgcctggcctattcagttttctatatatcttttcagatattttctatacaaatacaagcaaagatggatggatggataaacagtttttttaatgccaaccatattgataatgttgtcatggaatttgcatttttcagttaacatcctcctgacattttctgtaaattagacctatcagtcaggttttcctacagtaatgttatgcaataaacaaccttaaaatctcagtgcctcacaataagtatttatttattgcttatgtcacatgagagttgcagtgcatctgttgttctgtgggtttggtttagctgggctcatatggctctgccctggtaagttctgcccaactcatttttctcattttggaatctaagctgacaaagtagccactgtgtgacattatgcccatgtgatagagggctggaacaaagggcctcagccaaggtaggcaatattttattttattttattttattttattttattttttttatttattttattttattttattttattttattttattttattttattttattttattttattttattttattttatttttttgagacagggtctcaccctattgtttaggctggagtgcaagggcacaatcttgactgactgcaacctctgcctcctaggctcaaatgatcctcccacctcagcctcccgagtagctgggaccacaggcatgtgcaaccatgcccagctaatttttgtatttttttgtagagacaagctttttccatgttgcccaggctggtctcaaagtcctggtctcaagaaatcttcctacctcagcctcccaaagtgctggagttacaggcatgagccactgtgccgggtggcagtcaaattttagaatgtggcaaatatcacacccattcttatcccatggtcaaggcattttatatggccaagaatgaagtcaatgggggcagggaagcatggcaaggatgggaagtaattaaataattgtaaagaaacaatatcagccaggtggagtggctcatgcctgtaatcctagcattttgtggggctgaggcaggaggttcgcttgggcccgggagtttgagtccagcctgggaaacacagtaagccctcatctctactaaaaataaaaaattaggcaggtgtaatagcatgcatttgtggtcccagctactcaggaggctgaggcaggaggagcacttcagtgtgggaagttgaggctgcagtgagctgtgattgattgtgccacttcattccagcctgggcaagagggcaagaccctgtctcaaaacaaacaaacaaataaacaaacaaaaacaagaaacgatgtctcctactacatttgtacctatgccccattcttctgaatgtctgcatagtattttattaagagacatatcaatcgtattatttatttttgcaatcaatgctgcaatagacatccttagaactttaaggatatccttaaatacttgtggaaacacatttgtagaagtagaattacttgaactaatggtttatgaatttaattttttaaatattcctaaattgctctccaaaagtatgatatcccttaattctttcccaagatatatgagatacatgtccacaaaccctctccagactttgtattatcaaacttttaattcaaaaggtaaaacattaatgtttttaatggcatttgttttgttaatgatgcagtatttttaagtgtcctaaatttggagataattctatcacagtcccagaatttggattcacccagatctcttggaaaatatcttaactacattaacaccaacccaacatactcaccacccacactatgtttctctgtacctttggttttattctggagaaaagcagagctaatcagcttgctctatgatatggtttggctctgtgtccccacccaaatctcatctcaaattgtgacttctcccttgctgttctagtgatataattctcaagagatctggttgttttgtacatgtgtcgcccttccccttcgttctgtctttctctcctgctgccatataagacgtcccttgcttccctttcaccttctgccatcattgtaagtttcctgaggtctccccagccatgcagaactgtgagtcaattaaacctctttctaaattagccagtctcaggtagtatctttaaagcagcatgagaatggactaaaacatctctaaaacagagacattatgaaaggttttcaactggagaaccaagtcctataacttggtcgttgctatgtttagtgccttgatgagaaagactgtgaaactgaggacaggctcagcagggaagagggatgtgatccattcttgatgtgtgtggtgaactcaggaaaggcggcagcatcatgtatagtatctatttaccttccccacccttgaagctgctagaactctatcagcattttcatctttctttgtaccatttggtctgtcccaaatcacagaagataaatattgagcaagcagatgagcagaaaaacaacttgggctctttcccatgcctctactacctgtctgtatcacatgaagctttttgaaaaaggtcacagaaaatgattttgaaaagaggcccagtaaatattttggtaatgttttggtgtgggctttgtttggcctttttgtctttgctgaactccgtggcttgggcttttaagatacttttaccgtcagagtaatattattttgataacccacttcctcgtgatgtttgaaagatggttaattattgtagggggtgtaaatacagtgtcaaagtaaatcattacaggattctttggtcaggctcaaggttaaaggcaaccacatttcccaacaacagagcaacataatcattccttttcccacagataactacagtcttcctgtcagcctacaggaatcccatcccctttcctccagtgtaaccggactccctgccacagagaaacaacactctcctcttcagctttgccacagggtaatcagtcattggtacaccagcttgatccccaaatgctgcagtaaccacagaaaccacacagaatgtggactgaccacgtggttgtggacatagtcatcatttttaacacagagagatgaagtcactccatcttttctctgatgcagtaaaacattaaaatacaacattggaaacaaatgcttttccaatgtagaaatgtatgctgtaaagccaaggctccattctacatccctgagtaagggaaggaaagaccaatgagacaaattcctgagagcccgttaaaaattggtgtaacccattctcagagaagataatggggaggtgacactaagggggtacagaagattgtcatctgcagaaaaatcaggcatgttttcccagaagagagaaagattgaactacctcaattgcaaaaatgtgggaaccccaaagaaagagatacagcaaattcaaaagcattaagaaataataaagaaaagaaaatcttggctttaaagtggcaattttttttttctagtgactgaacagtaatcttctaaggagaatagtgagagcccctccccaatagagttttaagctttcactgtgaaaaggctattcttggctcagcaacccagctgatttattctcaccttgaggcagttctgtaaccttgccttctacctcagcttcccagtcagccaagtgggacttccgacttgcaatctgcttcatttgctaggatgtcatgaagattaattaacaacattaatatactaaatgttctttgggatgggcagagagaaagtgtaattatgaccattattgctctgggttactaggcagagtattgagatggttgcagggactgtgcttggaagtagaaaaacaggccaaacggtgatctttgcatggtttcaaatgcccctggcctgaaagtacttcctctatattcttgcccagggacttaaaatgttcacaattatgctaatatagcggaaagtgcgttggacttggagtcagaaagcttgtatcccatgctgtctttgccacttactggctgtgtgatcttgtacaaactacttaattgttccaagtctcagtttcttcatctgtgaaaaatgcataaggataccaccaatgtctatatgccttacagtgttcctgaaaaatctaaatgaaatgtgaatatttctaaaaattggactgactatacaaagataaaatattattatctcctagaaaaaaaatgctgtaaccattataggctattttatcccctactacaagttagtttatgagacacaatccaccaacataagtacatctaagacagacaatttttggctctagagaaagatcagaaagggtaatatggttgtaaaactgaggacctcagttagccaggcatctatgtggggtgcttgggtgtcagtgagaagtcagggagacatcaaataggagctgaaccttttgttgtttcctgatgtgaggcctccctacagggaatggagggcaaacttgtaatgacttacaatctttgtatcttaaaatgttagtcctggaaaggaattagagatcattctagttcaattctttcattttacaaaatagaaaactaagcctccaccttaccttgaaaattcccttcttcctgatgcttagaccaggattatttccattgcacaccatctccaatatgcaactagttattaaggtctgtgggtgcacttgcattgaattattactcatacccacatcttcctgacctgggtccaaacccccaacattataagtttggactagtacaacaatctcatagtctatcttcctctattttttttctgacccctaatcttctctaaacactgatcccagattagccttctaaaagtgtccactgaataatgccttatttgctcaaaaacccattaatggctgctgtgtacagaagagtggtagcaatacctgcctgccttatctgagttatggtatattctctgttcctaaggggatgacactgtatgccatcatccctagtgttccagttctagaaagggattgacaaaaatgataaatgcaccactttcctgggtttgctgttcatcttaaaaagaaatccaattacagtttgcaattgcattttggtaaaacataatgagctctccttggagttgccttattcagatcaaattacttcttggtaatttaaagtacattacatctcccagatacctctcaatacacccacagtgtttgaggccttgtgtaactattgcacaaacactggccagtcaactctagatgagttcataaccaaaggattattacatgtttacccacatacaagtcactcttcatttccctcatgcagggaggtcaaaggtcatgtaactctgccagagcaagttacttctcagggactgaaaatgagagttaaggagagctttcttctaaaaacattactgcagagaggtctaaatgtgtgtgtatgaatgatcaacattatcagtcaatgaactttctcggtcagttactctcatgtattgacataaatgacactgagccatctgatgactaataaaaatgacaaaccctgaaacattgaccaaaactcacaagaatgacatttcctaaagcatttccatttatagaaaaagttagaaaaaagcaaagaggaaaaaaaagtatatgatgagaagctgtaacagtaagagaaaagaagtagacctgaaactttataaaatggcacattgtcccctgatttctccaagaaagttcaatatgtaaaatgtcaacagatctgggtatcactaaaattttctccactaatttctacaggccagaaaggtcatctaagactttaaaagtgcagaatgatgtaagttttcgggagtattattcagccaagagtctcatcaagatagctcccccccactccccatgcaatgagaacaatagccctcaagagcttttactcttgacatttgcacctttatttacaagatggtatgtcatttgggctttataaactttacatttatcttctttttgtttgttttttcatttttctctttatacacactatatcaatgtatatatttagaattgtttttctttttcttttattattataccttaagttctgggatacatgtgcagaacgtgcaggtttgttacatacgtatacatgtgccatggtggtttcctgcacctatcaacccgtcatttacattaggtatctctgctaatgcaatccctcccctagcctcccacccccttacaggccccagtgtgtgatgttcccctccctgtgtccatgtgtcctcattgttcaactcccacttatgagtgagaacatgcagtatttggttttctgttcctgtgttactttgctgagattgatggtttccagcttcatccatttccctgcaaaagacatgaactcatcattttttgaggctgcatagtattccatggtgtatatgtgccacattttctttatccagtctatcatcgatgggcgtttgggttgtggaatttaattaaactaaagagcttctgcacagcaaaataaactaccatcagagtgaacaggcaacctacagaatgggaaaaaaaattttgcaatctatccatctgacaaaagtctaatatccagagtctacaaggaacttaaatgaatttacaagaaaaaaacaaccccatcaaaaagtgggcaaaggatatgaacagacacttctcaaaataagacatcatgtggccaacaaacatatgaaaaaaagcttatcatcactggtcattagagaaatgcaagtcaaaaccacaatgagataccatctcatgccagttagaatggtgatcattaaaaatcaggaaacaacagatgctggagaggatgtggagaaataggaatgcttttacagtgttggtgggagagtaaattagttcaaccatcgtggaagacagtgtggcaattcctcaaggatctagaaccagaaataccatatgacccagcaatcccattactgggtatatacccaagagattataaatcattctactataaagacataggcacatgtatttttatttcagcactattcacaatataagtttttattaagaaaaaaaacagagcctctctgtaaaattaatccttggttctgacattagctacctgtatattcttttttttttttttaagaatatttctttctttttttttaggttttgtgagggtctttttttttttttaacttccatagattattgcagaacagatggtgtttggttacataagcaagtcctttagtggtgatttgtgagattttggtgcacccatcacctgagcagtatacactgcaccctatttgtagtcttctatccctcacatttatcttctgatgactatctctatctctgctagttttaagaagaagcctaggggctgggcacggtggctcatacctgtaatcccagcactttgggaggccgaggcaggcggatcacctgaggtcaagagttcgagactagtctggccaacatggtgaaaccccctctctactaaaactacaaaacttagccaggtgtggtggcaagtgcctgtaatcccagctacttgggaggctgaagcaggacaatgcattgcttgaacccaggaggcagaggttgcagtgagctgagatcatgccactgcactccagcctgggcaagagagcaagagtctgtctaaaaaaaaaaaaaaattaggctggtgtggtggtggatgcccataatcccaactactcaaaaggctggggcaggagaattgcttgaacctgggaggcagaggttgcagtgagccgagatcatgccactgcactccagcctgggtgacagagcaagactccatctccaaaaaaaaaaaaaaaaaaaaaattaaaaaaaaagaaggagtctagggtgtgaaggatctttgcacaacagagtcaacttcccttgtactgctcgaatcacatatataccatttctgatagataatccccaaatgatgctttaacatttccaatgattggcaacatccattgttagcagccttttgggcagaagatcaatttgattccaaattaaatttgtgctcttttctgtctacagaaaagaaagcaaacaataagttagcaatactgtaagttggagagtcgcaattaggtgactcctagaaacagaaaaataaattgccttctatgactcagaatgcaaaatagaaactacaggtcagaacacatgtatatagagaaacttgatggagacaggatggtttctaggccaaaagaaggttgcaggaacctatctgaatgtataattgtagtttttagattatgtcagtcttgggattgggggtaaagaaagagatacataagttggtacataagtcattcaattatgaaaacaagcaaaaaaaggaagtcaccagggccaacattgtcagtgcccagccaaacaccgtctagggagaagagggcctttgctattagagcattttaatctatagggcaatataattccagtggagatggataaagactggattttcgatggctctctgattcaattaatttatgataaaatagaaggctaaagttaacataccttgatgatataaaatatctgtattatcttgttccctctgccaggatcatcagttagacccatctctatctcctttttgactggctcatgatgttttccctctcagatctcagatgtgaagtcatttcctccctggaagtcttttccaatatacctaatccagatttgttgattctcctatatatttgcattgcattctgcacttcctttatcctatccctccttatctagtatatcattatctgcttttaggtagttaagtatctccttaagattcctaatatcagggcctacgtattacagaagtctggtccatatttgtatctctcaattttataatttgcatgacaaacaacttgattctttccaattctatttgcaagctttacaaagtttcttggggaaaagaagaggtgggatgggcatttgaagttgtgagttaatctgatcattaaaattatgaatataaaaaaattattttagcaactttcaaaggttctgttgaagacttaactgcttttgctgcgtatacaacctgttagaaaagaaaatgaatgaaagaactgaaaaacgctctcccaaattaccctataagaaaggatgataaattttaaaatgagatggtagaaagaatgcaatcagaaagcaatcaagcaggttccactggtaaggaatagagaaacgaatggtaagaattagaagacgagaaggtaacgctggaggaaagatgggtagagaaagcacagcagagtgccttctggcaaagaaatgtcaaaccttctgatgacataggaccattttatgctgactgctaataatttaaaagatcatactttaggaaggaatgatgctagttcctcaaaaaggaagaaactcatcaaggtagtttgtaaagtctaatgggctcagacctggccgggcaactgggtgggtttgtggtcttgaaacatacatccaggatgtggcaaagagtctgacaagactcagcaagcccacaaattgctactcacttttgatgattaactgtggaaaaatgacaaagttgggggaaaaaactgaaatgtgtctctcaaaattccatggttttggttagaaatcaaaagatgagcaacgcctttatccctctttatcccttcttccagttatttttgagactgaagaaagaaaagaagacttcaaagtttaagctacacaggacaaagacagtgcccactgtgctcatcaccataagcccagagcctagtatggaacctggaaaacaagtacttctctgattgaatgactgcagacagtgaataaatggctacatagattatataaaagacgatgagtttgtttactggtttaactatggtttaagtttttaaagtagaaaggcagaatacaaatggggtaaaaactgcaactccagatttcagtgaggacagagtttaaagagtacctcattcgtttaataagttttaatcaataatacaaagagaattgcattctggcatactaaagaaactcacaggtataatctcagcatgattgctaacattcaaggaattatgaaaaatgaaagaggcttcaaaagtatagagataggaaaatattactgagaatattagaagtggggaaggtaagttggatattagaaatgacaaatagataagtttgatgttcatctataccaaattaacaattagttgttttctgaacatctagaaaagatgatggtgattatgaggagccatcagtaaagaccccccaaacaattctaaaattagcttgaaagtatatgtgtagcattattaatgaatattcttaaaatagctatgaagagaaattagacttatgagatctgttttaaaactttttaaagcagtaataatggaacccatatggtaatatttcaaaattaagaaactcaatccagggaacaggataatttaacatgtgatttaaaagatactgctataaaaaatggaagtaggaaataccatatgatatatggggttaagataatagtaacaagagaaaataacatagatatgtttcagtaaattccaagaatcttaagtgttttaattagtcaaataaatccagaagacacagattaaacatttataccattaagaagagatgatcactttggagagtttgagtaatcaaatatacattttatataataaatatttattaagcaactactctgtagcaggtactattctaggtattagagaattactggtgaacaggatatccagggtccatgctgccaagaagcctatattctagaaggaaaagacaggcaatactaggtaaatggattaggaaagaaaataattctagagagtgatcacatattagagaagccattataaaatgtacataaaataaaaaagaaatataaccaaataagaaaatatgtgcatcaaaaacgacagaaaagaacaattccttaataacctcagaacacatacctatatttttagaaattacccttaggattccaataactaagtgatcatgtctcaaacaaacaaaatttacacaagagaaaatacaaataggaaacaaatgtctgggaaaatgttccaactaacatgtaatcaagaaatgcaaatttaagcaactttttaacatctgctaagtttaaaaaaaaagtttgaaaaaataaaaaccagacttacaggaagaatgacaacataaacgtagtctctgctcccctccaggaaaacggctgaaattaccaaagtggagggagatggggtgggggtaggacatcagccgtgaaccaggaatggtgccaaccacatgtcaagcacaaagtgaggaatttctaccagtttcaataccaactgtaaaaaagaataacaacctttcctcaatggcagttgcaagaaaggagagaaggaaactatggtgaaattcatcagcaggtcacaagcagatgacagacggccatatgtggagtccttctccctatgcttggagacaatccacagctctggtgtcaaagagaagagaaagcaacgagccactcctagccatttttcacatatgtggcaacttactagtggaggtagtcagttgaatatgggctggtgtggggtgtggggtgtggggtggaatttctgtaaggtctaggcatcctgttggagagatgaggattgatcaaatataaataacagaaggaaaggcaggtgtttgggagaatacacttctagccacatcattcaggaaacccataggccaaagactttttctcataaatgaattacttctagcagtgtttctttgccctaagcctgaggctcaatacaggtctggaaagaccttccccaagtgactggatacacctccagctcagtgaggccaccccttctgcagaagtttcaacagagaaaaattatgccaagtacccaggttttcaatgcccatggctcaagaagcatttctatcattttttaggtttgaatgaagacatatttgctcatatgatgttgcctcatccatccctccacttactttctatggggaggagcccagtggtacccaaataactagagaagaaagattacctatttgcattatttaggaacaaatagcaagcctgaatagaacttctcacagagataaataaggagaaaacaccagtatggatctaaaaagacatcacagagtaaggggggactatttaagcatgcagcatctagaatcagaatcccagctctaccatttactagccatgcaactttaggcaagataattaacctttctatgcctcatttataaaataagggtcatcatcacaaagattaaatcagtatgtaaaatactttcccaaatatccacatggtaaatgttaggtattgctatcattgtccctattttattatgtctaagcaaaaaaaatgcaattaataaagacaataaactttggatacatcattaatgctttttttaatcaaatatttctggctagtcttccagacagatgtactttctgtctcctttaagttaggcaggatggtgtaacttgttttgatcattaaaatgggaattaaagtcatagtttaacttctgggagctaaatcacctgagttcaggagttcaagaccagcctgaccaacatggtgaaactccatctctactaaaaatacaaaaattagaattagcccagcatggtggcacacacctgtggttccagctactcaggaggctgaggcaggagaattgcttgaacccaggaggcggaggttgtagtgagccaagatcgcaccattgcactccagcctgggcaataagagtgaagcttcgtctccaaaacaaacaaacaaacaaacaaaaagttggtgtgtgaattcatcaagtgatttctttctcaatcatagcaaccttctacatggtggcagccccatcagcttgtatgctgaagtgaagataacttgaagcagagccccaatcaatagctaaagcatgagtgaggaaaaaaagctttattatactaagccactaagaagtcaaggttatttattactgcagcacactgtagcctatactgactgatacagaagtaaaaggtaaaaaagaaaatgttttcaaaaacttacttccagaaaacagtagagtgttttggacaataattgctgtatagacctagagacagtaatgataaaataggcagatgaagcaacagctgaaacatgacaagtcgagatatccaaatgagattaacggtgaggcagcaaagtcaaagaaaaaacgattgggaaataattgtggcaaaagcttgggcaaaactaaaggatcatgtatcatcatgttgaagttaggccctacctcacagtttagaaagaatcacagagcttttatagcccaaggattgctacaaaaatgttcattgaagtgtttcttagagtaattaaaaaaaaaactgaaggaaatctaacaactaagagtagagaatttgttcaataaacctgtgcaaatctttgtacctttataacatcactgtccaatagatctttccacactaatggaaatgttctatgtctgtgttgtattatgcaatacagtagccactaatcacatgtggttattgaacatttgaaatgtggctggcatgactgaagaaactgaatttttaaggtatttgatttaattttaatttaatttaaatagccacattggctggtagcttccaaattggacaatccatattttttttcttcaatttttgttttaagttctggggatacatgtgcaggatgcacaggtttgttacataggtaaacatgtgccatggtggtttgctgcataggtcaacccacgacgtaagtattaagtccagcaaccattagctattcttcctgatgctctccctctcccacatccttctgacaggccccactgtgttttgttatccccaaagtgtccatgtgttctcatcattctgctcccacttataagtgaaaacatgcggtgtttggttttctgttcctgtgttggtttgcagaggataacagaacagcccatatttgaaacgatggcatagatctgtatttgttagcaataaaaatgttcataatttattgataagatattttagagagcagttaaaattaacttatttgtgtgtgtgcatgagtgtatttgtgcaaatacatactaactgaggactccacaccaaaatgtcatcattgggtactggataatggcagtatggatgatttttctttcttctttaaatctttttggactgtctatggttttcaaataagattgcagtactcttatatacagaaaagtaaaactgtttttctttctttttttctttttgagacagagcatccctctatcgcccagactggagtggaagggtatgatcatagctcactgcagcctcaaactcctgggttcaagtcatcctcctgcctcagcctcccaaatagctgggactactacaggcacatgacaccatgtctggctaatttttttttactttttattttttgtcttcctatgtagcccaggctggtctcaaactcctgagctcaagtgatcctctcatcttggcctcccaaagcattgggattacaggcataagaaactgagcccaccccccattttcatttaaaaaaataaaattattgaaagctaatgcttgtaatgctgcaggaaaactgttgatgttattacaaattgatataattattttgaaaaatgttaaatagatttccacctcaaaaatgtattttaagataactctcaaaagaaggaagaaagatttactcaaaaatcctgtccctagggaataattatttcaattattttgcaacagattaattacaactctcttaaaatgtgtctgcagattataacagaaagtgaaaagggaatcatgttaaaagctgatttaagacagtggaaagttatctgtttttattttcctttaatattttaatactactctcaataaatctcaataaatctctgtacaagggccagtacatcagaagaataagcagcgctaaccactaaaacgtaattccctggttctcagtgactcaacacagttgaggtttagcagttgtttacatcatattctgatgcagtgaagccgatgccctggacagccatcttctgaatggtaactgttttcatcccttggcctccacagtcatcatgaaagagaggagagagcatggaagattgtgcagggagtttgatgaccaggtctcaaagtggcttccatcacatctgtttacattccatagaccggcatctagtcacatagcccagactaaactgcaaggaatgttgcaaaacataatccttctctatgcccaagaagaagaatggtgtctgggagcattctagccagtctctgcaaaacttacatcaaaccaaattcatttgctttcttaataagtttattaagcaggttgatggatgctgctattggagggcccaatattatattttggaattaaaaaaaatacaaatggccaacaggtatgtgaaagtatgttcaacatcactaatcaccaggggaacccaaatcaaaccactatgagatattatctcatacttgttaggatggccactatataaaaataaaagataacaagtactgtcaaggatgtggggaaattggaacccttgcacactgttggtgggaatgtaaaatggggcagccattatggaacacagtatggaatttcttcaaaaaattaaaaatagaacaatcatacgatccagcaattctacttctgcatatttgtctaaaggaattgaaatcaggatctcaaagagatatctgcactcccatgtccatggcaacattactcacaatagccaagatgtggaaacaacgtaattgtttatcaaacagattaacagataaagaaaatgtgacatgatatccatacatattattcagccttagaaaaaggcaatcctgtcatttgtgcaatacagatgaaacttatgggcattatgttaagtgaaaaaggctagtcatgaaacaacaaatactatgtgattccacttacatgaagtacctaaaatagtaagacttatagaaggacaaaatagaatagtggtttccagggtcttcaagaagagggaaatggggaattgctcaacaggtataaagtttcagttacgtaaggtgaataagttctaaagatctgctgtataacattgtgcttatagttgacaatattgtactgtatacttcaaaattgttgtgttcttaccacaataaaatttttaaaaatcccttcatatcactcttattcagcatcatactgcaagtcctagctagtgcaatgagacactaaaaaccacagataatcaaaagcataacacaataatgacataagcttataccactcagaatcaaccattcttaacattttgtcgtataacatttttgctataatatcatattgcattgtatatatcactctgcacattgcttttgtcatcaatgtgttttaagagccagtgttcctacttagcattccagttcatttcttttacttacagcaatatagttcattttataagtatactatatgtatctatttacctgttactttatatcgtggttattcccatttttctctataaccattctgcaaggaacatccttcagcatgtctttttatgcagatgtgaaatgacacatgcctagaagggaaattgcaagatcaaaaacactcatttttttgaacattataaacatgtataacttgtagacatgaatgaaaatataaaacacatgtatatcaaatttgtagatgacacaaactcagaagggagagatgttatgataaatgacaaaaatcagtgttcaaacttttcataagtgagaatactgggccataactaagaagatggaatttaagaaagataaagataaaatcttgcatttagttgaaagaattaaatgcccattgcaaaaaggccgcgttattacttgacagcaatttatttgaaaaatgtctgggatgttagttggcctcttctttgctgtgagctaacagtgtgacactatttagacccaaaaaaatgtagaaagacagtcccagatttatgatagttccacttaactatttttcaactttatgatggtgcaaaagcaagacacattcaggggaaaccatactttgagtacccatagaatcacggtttttcctttccagtcaaatattcaataagttacataagatatccaacacgttattaaaaataggctttgtgttagatgattttgcccagctgtatgctaatttaagtgttctgagaatgttaagttaggctaggctaagccaagatgtttggtaggttaggcgtattaaatacattttctgcttacaacactttcaacttacaatgggtttatcaggacataacccctccataagttgagaagcatcgtatttatacagctatattcatagaagaaagttttggagggtctcaacgttaaccttaattttattctaccaagtcataactctatagtgttcaaataaaaccaacttatattaacataaggaaaaagagaaagcagtcgtttcacatactacactgcagagaggatgggtttggagtaaggctagaagtaaaaccagagctccaaacgctgctgcaactcatcccttttactgcctcccatcaatgtatctctctgcctactgtatgtattctctgagctaccaaccacatgaagctggctatggcctaaagaagatctagatcggggggtccaatcttttggcttctctaggccacactggaagaagaattgttttgggccacacataaaatacactaacactaatgatagctgatgagctaaaaataaagaaaaaaatcacaaaaatatctcataatattttaagaaagtttacaaatttgtgttaggccacattcaaagctgtcctggtctgtgggttggacaagcttgacctagatgatcctcatctgcagcttcaattcatgaactcccaggaggggtctctgcttggcccagcacaggtcttttgtcaactcctttgacaaatcaggatggcagccaacttcagaatcaatggttggaacaggagaggtacaacctatagatagccttaggaagattgtagttgaccaggaagcccaatttgtatcttccaaagttattgtccttcatcttggagtcactgggtatgtagttatctgcagacatgcttaaacacttaacttcctttgcttagaaacctctcctgattctgttactcttaggctgtgtggtcaacatcacataaacagtgagccctcgatatttaacagacaaataaacccaaatacatattttattcactatgtgatttttttttcctcctgggttttatatttttaagattcataaaaataaaatagttacttatgtatcatggcaggtatcaagaaatgtactcccatcagctgaatggggcccttgtaataattgcagcagatataatcagtatgcctgcctaaactgtgagtctggatcattaccaaacttgatagttactgagctctgactgtgtgcaacactataggtgtggatctacactagaggatttaaaacctcacagagccaaccaaactgcaaacaactggggaagatggatcacatgcagaggaaagacttaatcagctgaagtttctgagtagtagtccctgattatcatcacatcttaagagggggccgcaatagaatccagacaagaaaaggatattcagaataagtgagatttccaataagacataaaggagaaaaagcaatttggctaaaaagagaaagagacctaggatacagattcccatttggagtattttgctgcacactttatatcaggggtctaaacccagactcagaggcagaatcgtatggaaaaccgacaagatcaggatcttgggtcctaacttgaaaaattcttatccaattcatctgagtggagttttgtgatttatacttttaataataattgtagctgataatctatagcacttactacatggcagacccttcatttaagtgttttatatgtaatattaactctctaagtcctcattttagccaatgtattaggaactgttattatcatccttaatgatgtgaaaactgaaacccagagaagcaaagtaacttgactaaggccatgcagtgttgggatttgaacccatgtagttgggcttcagaatctgctaatcactttgttctgcagattctcaaaaaataaaataaaataatgactatgaaacttgcaggcaattgtgatgaattcagtgttgaaaccactgcattctaacacattcaaaaattattatgtactgagcactgcttcaggatagaggctctattattcaaagcctggcatatagtagatacagaatattgttggatatattccaaacagaaggagtccttagaagcaagattttgtatagggaaatctgttgggcctgcctgctaccgcagaaaggaagtggggcaaactgagtgactcatatcatgttttctgtccccattataagaaagtgccaagaatcagaataagagacgcatcattctgaccctacctttaaagctctgcccagccccttaaatctgtgccgcttatgcccacacactaccttaattatttggagaaacaagactttcaacttttctctttcagctcatccttttcttcagttccatccttttttttttttaaagtggtgtgatcatggcttactgcaatctcagcctcctgagttcaagtgattctcctgcctcagcctcccaagtagctgggattacaggcacatgccaccacacccagttaattttatatttttagtagagatggggtttcaccatgttgatcagactggtctccaactcctgacctcaggtgatccacccacctcggcctcccaaagtgctgtgattacaggtgtgagccactgcacccggccagttccatcctttttagaaacaccatggaatattaagaggatgtgaaactccaagcagttgatttctctgcttatttaaagtgaagataaatggcttgtacatgataaatatttttggatggatggatgggagaattaaacaaagagaattaaacaaagaattaaacattgaatagaaacccagtggtagatcactgtccatgtctcctatgggtctgtcaggactggctgtcttactggtaacatgcaatacggtgttataattaagtgcactgtctttggattaggtggcttaggctcagtcctccttctaccacttactagctgtgtgatcttgggcaagtgacttgtcctctctaaacttcagtgtattgtctttaaaactagaaataataatagcacttaaactaggggtaataacagcatcaacccacaaaggtgttgtgaaataatgtacctgctaagtacaatgttcaatgcataaaaatgcccaattaatagcaattatttcacaggaaataatatcaggtttggtggcttgaaacttgccttccaatatcttttggggtaaaacttgacaggcatttttttcttccaaaaggcaagactttggggaacatgagaggcaaatggcagattttatttagactggcaaggaagaaagaaagggagagagggaggaaatataaaaagataacctttcctcttctgaaaatcacacatcaatttttttttatacaaaatagggtccttctctatcatccaggctggagtgcagtggcatgatcatagctcactataacgtcaagctcctgggctcaagtgatcctcctgccttggcctcccaaagtgctggaattacaggtgtgagtcatcacactgggtcataacatttctttatattcatgtgactccaaaggtttagctaccagtgatgaagttatcccaattacaattcttagacaggaaaggaaatgcagtcaacttctgagaaaatgggttgactctctagaaagtctggagggtgtaaatggcccatgttctgaagagggaacatttcaagcttatgagctaggctcacctcaaccaaagagctcagctaatacaatatatccttagagcttagtttgtttctggacatttggattatttatttatttaagtatttattttagtgcatcagaatcaatgtagtacatcagaatcaatgtagtacatcagaatcaaagaattgaactaaaatgaaaatcaaagaattttagtgcatcagaattagtatagcactttgaagttagacaaaccttaatttgaatcccagctctaacatttaatagttgcatgaccttgggcaaattgttgacagctgtacacttcagtgtgtttgcgtgtaaaggggaggtgatactgttaccttttacatccacatgttgggatgattaaacaaggtcatatgtataaagcactctattcaagacctgacatacagtaagcactctataaatattggctatacttatgtctcattgatattattattttcataatgtttcttgtctacttccttaatgaagtgcgtaatactcttcttgggcattaacacaggctccacctggcctgtaagtgaaacagggagagccctaggcttttgctttgttttgcacagagcctgcacagagcccacccaagtaaacaaaatctcctcttctttctctccattttaatttttcttttattccatgccctatgaatagattagtttctttctctctctttgccgaaataccttcaggcctcctctcctcccttcaggcaaaagtccttaaaacctccactttcccccagtaatatttttctccaactaactggaagtggagaaagattttcctctttgtctagcactgatttttgacttgtaattccatttcaacaaaaccacttgcactaaagcttacacacaatgtaaataattcattagaaatatatatttgcttgatgcttatatacttgcagtgcatctgcagagtctattgtatcagtcaaggaaataacaggactcccagtcaccaaggtgaatggaaaattttcctctttaaataggtaaaaatttaagttgcatgcaaattaatcttggaaatacagaatgctaacatagcaggggactttaaaatgtgtatattctaacactctctataaatgtggaaaataagtcccagagcatggtaacatggccataacaggccttgtagcattctggaatttaaaaggctaggtgcatagaagggaaaatagatacgaatggcaaaggcaggtacataatgcctaaaaccaggatgtggtgtagcagttaccatcgtcatcatcatcatcatcacaatgacaatcaatggtaatggctacaatttgggaattatgatcttggcactaagcagaggtctttacatttatctagaaagatgaccatgggtaacactgcataagactgactgatttagactttgagaattttgccagttttgggtggctgtgagatatcttgtctgaccatagggctagatcatacagctacaagagaaggtgggatttcttcagaagggaatggacattgccactgtagttcatcccaggcatttttcaacctggaaagggaatagctacactccagttagaggtcctaggccaaggcaaaggagaatctcctgccccactctggcaccgagaaccagtttggtttctactccaaggatgggtgatatctgaattcctccctgtgtggtgggaacctaccatgggctccataagagcaggctaggaataaggttcattgaaggatgccaaataaaaaatcttgtggcatgtataagttgtcctctgtggtgtttttcagttccatgccccaggacttcaagacaccgatctgcaattgtgccagaggatgttagagaggcaactatgcccttgcttgggagaaaaccacatgagcagaccatgtcttttcacccaaggccagaggagaggaagcagaagacacatttcccggtgcctgattattccttcctccagggcttacggttgtcattttgggccatctcacatagaagaggtacccaaatgtttgtcatctctccctgaaagcgtgtctagtcctcaaatagaggaaagccatcactatctctctgccttctccatcgagaccaaaaaggaagatacaagctgggaactagatttgaatatttcttgatactggagaggggcagggtgatgtgatctctggtgagtttcctcctcaagcaggggtgcgggtagcctgggtttcctgggcccagatttcaaacctgtgtcagctgtagctgcacacagagtgcccagagctgttgggtgcagcttaggtatggcagtatcagtcatctccacacctgctgcagaaagtctcaggacagcactgtgagtggggctggggaatccggagaagaaagttctataagcacaacacggtttactttacagacagcttgctaccacataacgatttgggtacaacccatgaaaggagccccgcgggagtagaagagggtatctccatgtctctctaggagacgaacaagcaatatccactggaatccagaggctaaaaattgtgatgtcccaggcctaagctagacagagcagagaatgggcaggacttgcccctaaagtatgggcagttaaacaagaggaggaaagaagaaaaaaagaaaagaaaggaaacactaggcccaaattgatttaccggtgaattctaccaaatatttaaagaagaatttaaaccaactctacattgcttaccaactctttctatgaggccagcattattctgataaagccagacaaagacatttcaaaaaaaaaaaaaaaactataggcccatattccccttgaaaatagatccaaaaattcttaaaatatttagcaacaaaatgttatggtccaacagggctttgatccgaagaagtccaggagaaagagacaattcaggaaaagaggcagcaaaaggaaatgtgggaaacttggcccaaagaaggtttgaagcagacgatggatggcattgcctggaaaaattgcctgagtgtctgatcctaggggccagtgtttccctaaaggattcctacagttgagttcattaagattcttaggttgggatacctagaagaaaaaactgagacaaggattccagtgtgcatgatttacagagggattgctgtccagaaaaaacagctaagggagtgaggaaagaataaggaagagggagaaacatggcaaggatgtggacccagataaagtcagcccttgacctgacccacagggtgctctggagtataaattgcatgacacaattatcacacctggagcatcacctgcaccctgcgtcagtcagttattgtatgcctctggggagtaggagatgtcagctcccagtatcgctgagtgaggccgatcccgtcagcctagggtaatgctctgcagaagtctgcaggtggatgctgttggctgtggcactcactgcaccatcatagcagttgtaaaggggcttggagtgtggcaccaataacatctactgcggaggacttcatacagccactctcctccccctggacagttggagcctgaaataggcaatgatagcggaggtagttagatgaggtactcatgaactatttagatggtagaattgggaggacacgcagctaattccatatgggaggcagtgaggagggacagtgtttagctgatggacataagaagtataagattatactcatgccctggggaactggaggaatggtggggccattgtcaaaggtaaggaacatgaggaaaggagcaggacttggaaaggaacataaattcagtctccagcattttcattttgaaaagggaatcaatggcttatgaatagcatacctggagctccataggggtttcagggaccaattatattaggaagatgaggccagagagaggggaaaaaagaaaaccaaatagtctagtgctggccctcatcccatcctacactggagcacttctgctatcttggtttgattcccacaaatgcagactttgaggcaaggattaagacacattgaaagacgatctcacgggttaggtgtggtgactcatgcctgtaatcccagcactttgggaggccaaggcaggtggatcacttgaggtcaggagtttgagaccagcctggccaacatggtgaaaccccatctccactaaaaatacaaaaattaggtgggtgttgtggctggtacctgtaatcctggctacttgggaggctgaggcagaagaatcacttgagatccaggcttcagtgagtctatattgtgccactgcactccagcctgtgcaatagagcaagactctgtttaaaaaaaaaaaaaaaaaaagatgacctcaggaagcataggtgaggatagtgaaaatgaaagaaacagccaccaagggaatactcatgaatagattatctctgaagaccacaggggcatgatctgttggaaaccctctgaccatccatgtatcccacatgtttcccactgagggataagaagctattttgctaccgtgaatggaacctctttggttgagggtgtaagaaacccctcaatgccatgctagcttgaagaccagctgagagcctgtgtagaggctgcagaagaaaactagtgtgtagagaagcactcacacctcagcgggccacataacctggggcaagggatccatggcttctgctgcacctgctccactctgtttttccatatagcaatttctgaatttccatataagatatgttttttgctttgtttttcttttttaagagaaaaatctcctgtctagaaaaacaggttggtcagtgtcctaaaatcaaaagtccgcagcagaaggcactttgaacaagcagttattgcctcctctggtctcacctccaattctccatgtaaaattaatagtgtactctggggacatcccttccattatctagtcttggtgaaaagggacaatggtagaagcagggtaatctctgccatatcgattttctgtgtgagcttctttgtgcctccagggagacaccactgctttcagtgcctattagcagttgtgtcttttaacctcccggtcaggctggcagtgtgagtccaacaaaggctccggctccaattacttcgccagtacatagcctggctgaactggagcttgcggctccacatgctggaaattgcactttccaccaatacagagacaagcaaagaggggcattcaacaaatccccagctacagctcagcatggcagggaggcagaaaggacctatataccaattagccaggcagctatggccatcaatcatgggtgacctgggcacccagcatgtatgtccatcctggaccccaccaccgaaatcacactgaaaacttgtatccagaggaggcttgagacagccaaagctacaggtggcaaaagctttcattccagaaagcacttcaatcccacaacctggagaggaaggcccatacgaccagcataaaattaaaagtgtgcagtacttacaggacataattctatgcttacatgcatttctcagaaaattttggcaaagactgctaccttctgagcaaaactggacatagaaatgacaataacacatattgggtatttatcaccttcttaagagatgcatagccattttcctgtggctgagacagaggtctcttttaatacttaacatttcctttaggttggcctaatgcccaaagggaagctgtaataatctcccacatgtgagtttggtaaaaaatttcacaatgacaatttaattcactacttactgcagtccttattatggtctttgtacaacaggtaatatccctgttaatttgagaatcactgttaacctgaacctttcccattgttttcaaagctttctcttaagtgtcagaaacacacccaaatacacccaaacacacccaaacttgtattttagcccttctattgtgaatattcattaagggtggtgtgacatagtgcttcagagcacagctctggagccagcctgcctgagtttgattcctgctctgtcacttattgacctgcaacatcaagcagtttacttaacctctctgaggctcagttttaccatctgttagatgaagacaatagtgtctactgaatagggttgtcccaagagcacttagaaccatgcttagcacaaatgctgaggctacataatgctcagctcttcacttcctgcttctctggtcatgggtgttattataaaagtgcccttccaggagtttgagaccagcctggacaacgtagcaagaccccatctctaaaaaaaaaaaaaaaatgtattagcccagtgtggtggtgtgtgcttgcagtcctggctgcttaggaggctgaggcagggagattgtttgagcccaggaatgtgaagctgcaatgagctaagatcattccaatgcactccaccctggacaacagagcaagaccctgtctcttaaattttgttttaaagtgccctcgaattttgttaagacctcagaagctgctccatgagtgggtggtgcaatgttattggagcatgggggtcagtgaggagagctaagatttctgggaggccaacagaagggttagaatgtgcttcaaaatttagttgggcatggtggtgtgcacctgtagcttcagctacttaggaggctgcagtgggaggatcactttaatcgggtatggtggtgcactcctgtagtttcagctacttgggacgctgaggtaggatcaagggaggatcacttgagcctgggagcttgaagctacagtgagctatgaacatgccactgcactccagtctgggtgaaacactgagaccccgactctaaaaaatataagttcataacagtacataatagaggaggctcaaaacacatgccagtgatgaaaatgaaccctcgcttctgaagagagcactgcagtgtcaacaggtggctgcaaaggtggtgagcatgaccctggaccagggaggttaggcagggtcccagcccagctaagacttctttttggaaaccaacatggggtctgacaagctgtctcagtaatgaggctctgcacttttttcattctccccttgccagatggaggcacccccgtttagccatgctgctcccaggccctgctctctgagaaggacttggtcaaacactgcatctctggatcctgagaagtcagaccagttatttcagtgcctggacccttcctcttttctgacccagtatttccaaaagcaagtccattgttcagccttgaaaacagctgattgtgagagggagcttatcacagcccagcagactaagaaaacattttagagaaagaacatttggaaggttcattaaaatgctgaaaaaaagagcccccattttggggtaccttcagggctttctaacctttttggcaagtgagttgtttttttgtaaataataccttacatagggcccaaggtataaaatcaagtgcagggctgctctgttgaaggggggtctatagatgcttccacctccaaggagcaggctttggaggaaacagttctagtgcatgtagggacaaacagaggaagcagagactaccttcccaggggccctctcttggatgcgtgccctgcatttctgcagcctctctttcccttttctgatgctttcctctcattccatctgaaaagtcactacaagtgctagaagctaggccagaggataaagaccttgaagaaaactgagcctgacacctaatatgggattgaggaatagaatggaaagggggaaaatacagtggggaggtgaaaataacatccttagctgagaaatgacaggatgaacatgtcaaggcagtctcaacattttaaacgttttccaagaagagagtaagcagtggctcttgctaaaggaagtaaacgctgtcacggccaagctctctgcacaggtggtacacctaggaaggctggtgcttgaaatgctcctccctgaatgtaccagatagcccctggttacggaagattgtgcctccatgcacccttctcaaactggctaccccatcctaataggctacaagattcctggcagggactgcagattctacactggtttggagtcctgctactttagccggccaggtaaggagatgtttcactctcctgcccttatcatgaagaagcatgagaccaaggaaaatctgcatatatgaaaactgaggaatccagaaaagataccacaggattctttctgcatggggtaaaaaacctctctgtcatttacagaaagtctcccctaagagaagagataaaggtcattatcaggactggatttgaaaaactctgatgtcaggttatactcaaactacttaaagcagaatctctgggggcagtatctaggtaccagtgccagtgcactatcaagctgcagagtcactgctttagaagttgttacggagggagggagggaagggagggagggagagagagagaaagaaagagagagagtccaaaacttggaaagaagaaagaggactgcatgtcttctttagtgtcatactgtcacatcgttttccaggcccacccaaagattactgaactacctagaggaatatacctctgtttgaccttttcctttctattgattagaactcagatactgttcaaagttaacctgtacatttgtagccagtacacatgcaaatgatttctgtccagtaataaagaaagcccctaaggttgcagttatatcaccctataggatattatgcagctttgtatcttatctagaagtctatctctaatttggcaatgttcatctaacattcttcttttattgtctgtcaatacgtagttcctttatttttctttgaattagctttaccatattttggttcactcattgataaactgaatacattttgacatgaattcattttgacatgaattcattatattttgcataaaagttttttttaactttttgaaaattttactttgaaagtaggcaaccacttttatattctccatcaatgagcttaacttgctccaatgccagcactctgtaaaaaacttatccaaccagctccactgatgctggaaattcacatattggtaactcattgctgagttaactctgccatgtcgtcataccttagatgagtggtgaaccagatcatccagccagtcactcatctctgactctgtgggaatagaaccatgaaggagtacattttgaagaaatagcatgagttgagtaaagcactagcatgtatgtaggatggtgaggagaataatctaggaagggtgagagcaaatatgacagcctctgaggatggagggggagaagcagaatgcccaactcaaaatgaggtgatagacacaaagaaaattaactgccttcttcaaaattttgaactggggtaagcctgctcctgttacataaagatgaatgaatgagggagtaagagaggtttaatcagttacaggctggatcaaataggctctattggtctcatctttcaagcatgccttacctattggagcagcattacaggtagcttcaggagtgactgccacccagtgtgtgtgccaccacgttcagggtccaaagctggacctaatgatcattgaccatgtcttttccattgactatgaccttgacaaagtcatatgcaggctggttcaaaggaatcactgcatctatttgaaaattcactggcttccctgatcatcgtcctacttaatgaccatatgttataatttactgtggaaagtcaccctacttccttctttgctatagtcgggaaaccatatttcctgttacattagcttctaagagactcgagtgagcaagcaaattacagatctgaagacagggatgcatcccattcccatccctgacatgggtcacacaccaggctaaagtcagcatttttcagatagttcatcagcaatactaggagacctttccagcaaggttactatatcactaaagcaatcatgtgtgtgagtgcccccagccagattgagctaattcaatgtgaagtaatcagagataagaaaaagccactggagttataaaagtatacacatcaggtactttacccaagaggaaggggaagtttactgggaggtgaagggagtgcttcaaaatgataagaaaagtgaactagagaataaaatgaagattttattagaagttaagacagataatagaacaactttttttctactataaaaggaataagaggccaactaaggactcatcagggttttgccaagataggaagagtggtcgtttgccagaggagttggacattacagaaaaaatggaggaatgtgttttttcagtgctcaccagggaggaaaatgcactgtgtgccaatgcagaagtaccttccttaaagaagaaaatgcaatcatgaaaaccactggggcaaaaacatctccaggaggaagaagccttggaagtccatttggaaatactcaagccaggaatttccagtgctcctgaaaagaagagaagcaacttcgagcacatgaggcaaggagaacgacttccatctctttagagtcccaattcttagaggtcagggaataggcactgtccctgagaacaaaccttctcataataatggtagggcctcactggcagagctgaatgtcaatgctgggtgtaagttttctctcactgccaagtttcatcatttctctccctattacttgctccttatgggagtagagttgggttgaacatttggtcttagaccaaggggaactagtcagaaagctgggaataaaagcttttgccaaaagcccgtgttctcaacttccacacccagcttggcaccaagcagaaatttcctgtttagtccggccctattaggccccagtactctatttcagtgattggtgctgagaaaactcattagccattgggaaaatatcatattatatctctacctcacaccatatagaaaaatattacaagtagatttttaaccataaaaatattggaagaaaatatgatcaaacattggagacaattcttctacctatggactaagtctcagcaaaaatgatgcaaaaagtgatgctgtagatgctgtatatgcctggttcaggcacctaggttcttttttttctcttggaagcgtgatgtgccagtttccacagttactgccacaaaaccctctctggagatctgtcctttggcaacttatgcctcctgagctggaagtctctgtcagctcttctccctagcctcgtgaagctgaggctagacttaatccaaacccacatccttgcttcttcctctctttcatcctaattctctcactttactcacagttttcttaaaactgaatcctaattcccttatttcacatacagttttcaagaaaaactaataaatctcttggagggcagatcatctgagcccaggagtttgagaccagcctgggcaacatggcaaaacctcatgtctacaaaaaaaaatacagaaaattagccaagcatggtgatgcgcacctgtagtctcagctacttgggaggctgagatgggaaaatcacctgaacctggaaagtcaaggctgcagtgagccatgagtgtgccactgcactccagcctggataacagagtgagtccttgtctcaaaacaaaacaaaacaagcaaacaaacagacatctctgcttcagtgtctgtgtctaggaaactcaactcttgatacctgacttaactaaataaaaatgtaaataattattatgcagaaatataaatacatttaaaaagttatgtctctatgtatgcatacatatgtgtataaatctatttcgatgtcgtgggctgaattatgttccccaaaattcatatgttgaagtcctagtcccagtacctggttatgtgactatatttggagataaggcctttaaaaaggtaattaaattcaaataatgtcctttgtgtagaccctaatcctatttgagtggttgctatccttataagaaggggaaattagacacagagagagatattaaggcaccagttcacagagggaaaagcaatggtcacagtgagaaggggacaatttatatgccaacaagagagactccaggagaaaccaaacttgctgacgcactgatcttggacttctagcctccagaaccgtaagaagataaacttctgagtttaaaacactcagactggtcgcagtggctcacgcctataatcccagcactttgggaagccgaatgggtggatcacttgaggtcacaagttccagaccagcctgaacaacatggtgaaaccccgtctctactaaaaacacaaaaattagctaagcatggtggtaggcacctctaatgccagctactgtggaggtgggagaatcgcttgaacccaggaggcgaaggttgcagtaagccgagatggtgccactgcagtccagcctgggcagcagaatgagactccatcttaaaaaaataaaaaataaaatgcccattctatggaactttctttttttttttttttttttttttttttttttttttttgagacggagtctcgctctgtcgcccaggctggagtgcagtggcgggatctcggctcactgcaagctccgcctcccgggttcacgccattctcctgcctcagcctcccaagtagctgggactacaggcgcccgccactacgcccggctaatttttttgtatttttagtagagacggggtttcaccgttttagccgggatggtctcgatctcttgacctcgtgatccgcccgcctcggcctcccaaagtgctgggattacaggcgtgagccaccgcgcccggcctatggaactttcttatggcagcctgagcaaactaatacaattcatatagagatatatagtatcattatctctctctctgcctctttcacacacacacacacacacacacatacaacatacacacacacacacagacacatgtgacatttcaaaacatcaaaatatacaaagagcacccataaatctcaaaaaataaaatagaaaaaatgaacaagtgactcaactagacgattcaaagaagaataaatcaaatgccaataaatacctgagaagatgttcagtttcatcgtgttctccttttaggtggcacctgctctaccggccaagccctatctccctatcactcctttgcatgttattgtccagtccagctctcctgcattagcaagcccacagcaagtgcctggacagttctgtgcacatggtaggcactaaataactattgatgacaatgtaatagtgctccgaggtacacagaaaaccatttttaaggtaattcaagaagctatcataatggttttgaaaaatcataaaagaggaagaacaactagctccagtaagagagaaaactgttcatcacaagtaatgaaagaaatgcaaatcaaaaggcaatggggttactttttgcaagtttgcataatatatataaccaaaagctagaaagctttgctacttcgggtgcaataaaacatatttttggtttgctgatggcattgtcagttggcaaatacaatttggcaatgcactcctggccatgaactttaaggaaaaagtcaaaatatgaaaaacaccatgtgaaagacaatgtctacaatcatgctgcttatgataacaaaaaattagaaatacccccaaatgtccaataataaaggaatcatcacagaaatttcaggacattcactcaagggagtaataagcagacaccaaaaatggcaactacaaagaccaaataccaatataaaaattaacataaacgcacaacttaggatataaatttacatatggacgatcattatagctatgcaaacacatgcaagtaaagaaagacaaggatgaatacaggaaaacttgtgttgttaggactttttttctttttctctctatttcaaactttctcaatctttgcactgtgcatttcttgaaaagctaaagtcttattcaggaaaacaagacattcatatgtacctggataaatgaagtaaaaacaatgctggccatttttaaaaagtaaattgtaatgtcagaatcccaaaataaagacttagatattaataatagccactgacacttcctgaaatcttactaagtgctaataatgtgctcgatgcattttatgaactgtctcacttagtcttccaataagccaatgagggagatatgattatctttcctgacttaacttttgagaagatgagtcctagagaagagaagtaacccatccaagagcacataagctctgcagttagtaaacagctgtcacaaggtggctagctgcccccaaaagcatgcatgcttcctgttctacactgcagaattgttgctgagaaagagctgctgagccagggacatttcccagggctgctcactccctcccccaacccatcctttcttttgcatccagatggagccaccttcctagaaggcagacagcacatcttgtagcctgtccttagcagggcacatgctgctctagggaggagaatcaggtctataaatcagtcagaagtctgaaactaatatcagcaacagaaataattaccctttttaaaaaaagattgtattaaaccatggcaatactattcttcaccaattcaactgccagcattgaaaatatgttacttccgagaatagaagagagtgccaggaaatgggtaatttcctaacttgctggtggagagtaagttgatgattctaactttctttgggacaatttattaatatgaatcaagacttcaagaactttagaattctgtaagacttttgacccaggagttattttggaaatgatcttaatgaaataataagtaatgtgagtaaagatatatagcaattgtattgcttcatctcagaaatttgtatattagagactaggagaaaccatttaaacatctagttacagggaagtagaaaaattatactttggctacacaatgagttactatgcagctattttaaattatgttgcaagagaatatttaataccagggaatgattatgatacattatacagtgtgattccattcttattgcatttgtaaaagcacagctatatcaggcatgaatttgctctttctgtgcaggtgcaagaactatcacatttctttttctaattcgaatgaaatctggcttagaacccccatcctacatggctgaaagagccttattaaaaacagctgggcctccctctccccacaccacaccctgtacacatacacatcttcctgtagatcttctgactatcccaatgcttcttgtggtaccaagaaataaaaatgtgcaggttttcaggccatggttgttgcctctgctgccataatgcctcaaaatatacctggtattgacaagggctgcagttctggaaggaaggtggaaagagaaatgcctttcatagtactggccttgtcacaggcttgactacaggaggcttctgccattgtactcaaagtagtggggttggtgttctgtcctgggagaagcaccatcagaggttttgccactgttggtgtgtggggagggggtgcaggtcttagaagacctgtgatcattttctcttctcaacctcccctggatacttcacctcttttctaggaccactttattttattttattttatttttgagacagagtcttgttctgttgcccaggctggagtgcggtggcacaatcatggctcactgcaacctctgcctcccgggttcaagcaattctccctcctcagcctccagagtggctgggattacaggcatgtgctaccatgcccggctaatttttgtatttttagtagagacagggtttctccatgttggccaggctggtctcaaactcctgacctcaggtgattgcacctcgccttcccaaagtgctgggattacaggcatgagccaccgtgcccggcccactttaccttccatatttaaactccagtttatctctctcctcttcttgtaggacaattctgccttaattctatgactaacctaatcttccaaactaatgttttgcctgattatttctttgatgaccccaagacccaaataaactgttagtctccatcctttaaatccaatccatatacctttgcccacttatactcagaggcacacacaaacccacacacagatgagcttaaaccttagaattcaaaggcatgagtggcttttgaatttttttttcccagaggtatgtgcatgtgttgagagaagaggatagaaaagaaaagggtgaaatgagagaagtagggaaattaattatcattttattctctctcacttaagcagtgaaaacaagtcaacaaacctgccacatatgtgtgcattataaagccttgaagaaagtgtttttctttgtgtgatggggttataggaaaattcttattttcctctttgtattaattattattttccaaattttctacaaaaactatttattctacaatttaaaagaatgcaatttctttccatgttaagatatcaactattttttttctaattcttttaccaccttttgtatttctaaaacaaagaacaactgaaaagcaatgagaagtactttattgaaggacacagaccatgactgtaaaggcattttgaaaaacaaatgagaaagaaagtccaaaaatgtttcttaagtggtagctccactggaatcagtgtgcagctttctaaggtaatgaagtaaatagtaacattgattttggatgtaaatatttgaattgattactttgcttgtcttggttttaatctttttctctccccctaaagaacttccacacatgatgccactatgggggtgtgtacccacactgactaaaagtacttatacttaaagaatgttttgctattcccaatccaatatacaatcccattagaaggtaggttaatagatagccccagttcaaaaaagaactgctattaccctccatttttcctctctctgaatcagagattctcttgacaactatcaacagcccaaccataagatacgaatggagatggtaatcatgccacaaaaaaagcccagcagccccatgggggtgcctggaatggtgagattcccatgttcccttccagggcatttttcaatctagaaacattctatttcagcaatctctcctttcagacccttttccatctgagcacctatccagacattaaaattcgtatcttcctttaagaaatctccgtcacaaagccatcatcacccttggctccagcatagataagtcttacatgtgtgatcagaagtaccctggagggagataggaggtgggggagaaactaaaagggcataaacagaaagtgttcctcaacattttcccccattttcacctgattcagaaacaccttgagttcattaccaaatccagaaattatttaacacagatgtacttaaggagttcttgcctttttgtctgtttctcaagttgcccttcatcaccctgaagtcatgaccaggttttttagcagaaaaagtcaacacctgcagcaggcttggccaaggactgagctcatctcctagtcactggctccaggttcaggtgctgcttcctcccacgcttctgcatgtccttggtttacaaagcagatcctactcacagggagctcagggaagaacagttccttcatattcagctcttccaaagacagtctttggataggcggctgtagccaatatagcacagtattcaaaccatcctctcccaaattcacattgttctgcatcccaccactaatagattgtggtgttcccaagggctatgtttttaattaactcaatatttattgatttctattgtatggcaatcattatacttttttgtctttgtaataccaggtcttggtcataagaagcatataataagtgtttgtttttcaataaatgaatatttcctcacctagaaagtgagctctaagaggtcaggaacttgtgcctgacacctcctgggtgcttaaaaattcttcgttaaaattaattaattagttaactcgtgagtaaataaaataatcaacccataccaaaaaactttgtagctgacagtagcaataagtaatacatctgtacaatgaaaatattttgacttttggaattagacccagatccaaattctaggtttatctatatgtccccatatatagaaggaaatcgtatttatctgattgaatcatgaggatttaatgagttattaaacataaaatgcttggcatatttaatggatataaagtgcctggcttttctaatgagtcaaagatgctagtttctcacctttatctcctgtttctgaatctcagttcgtcatccttaaaatgacaataataatggctacttcatcatgatgttgtgaagattaaattgctgtggaaagttcctgaaacagtgctcagcaaaaatcatctctatttttcttacatttcccctaatttcattatgtagctaatgtgtgaagctggaagaaagaagtggattagccattcttaagagtcttgggacatgtgtttcttaatcttcaagactccctggtcttcaacccttcaacagctccctggaagaagaggttgtaaccaagactggttgtgtcctgaaattgatgcctctctttttctccagtctagaaatccctgagatttaatacaaggattctcagaataaaactacattccccagcccctcttgctgttagctgtggtcatgtgactgagttccagctgacggattatgaacagtagtgatgaatgcacatctaagtcctgcctttataggggaggaatgtgtgtctttctctttcccacttcctgtatctgaaacgcagacacagtggctaatcatcttagacaatgtggacaagggcactgacctctggaaagcagacaacaagataatagtagcttagtccttcctgctgctataaccagggtctcaggaatttgacaggaattggtgcaggaatgtctcagtctattactaagtattagtaatactcaatattattgccactattaccccagactatgtcattcataaacaataaaaatgtatttctcatggttctggaggcagggaagtccaataccaaggtgcaaacaggtccagtatctggtgaaggccctctatttgcttcatgggtgacatcttcatcctgtgtcctcatgtggtgaaagagttaagggaagctcattccagtctcttttataaaagcactaatcctattcatgaggatggagccctcaagacttaatcatttccaaaagtcctgaccacttaatactatcacctggtgtattgggttctaacatataaattttgggggtataccaacattcagatcatagaagtaacctaactccccgaaccatggagaaatcatgtgagcccctgaatgcttatgttcagctatctgagagagaaagaaatgtttctcttgcttaaactacagatacttgagtctttgctgtttcagatgaaactaaatctgatctaatacagaggcattaggagatcttcgaatatccaggcattgttaatgacaaatccttaccttaggcactttttaagcctcccccatagggatcccagccaccaggcaaggctaatctgcttggtcggcactgcctgctcaccctcttactggcccgcctacccagagatttaaagttcccacctaggcaaccaaccagaatccaatctagccttgaaagccccttccagagccaatcttgtcaatgaagctttccctgctgaatgatagctctctgggatctctcccttgtctgagctccatagcagctgactagaccatctgttgtttggttccaaccccattctgttttctagcccatgggttttcatccctatgcccttcctctttatattaacaaattcattaagaataagatccatgttttaggcgtttttatcagatgtttgtatctttatctgattttggaagtcatttctaaccatgaagcatcatactctgtactctagaagtaaagtggactttagagattggtttctacatcttcctaaattgtgatgtcttcaaaggcaaaaaaaaactgtgtcacaatgagctctgtgtccacagtaactgattcatgcatgtacctcagtcaatgcttacagattgatagatagatgaatcttagcaggcccccgtcatctagaataatgtcttgtccttaatgcctacatgcctctataaactaattacttaatgtgggtgttgccaaggaaagaaactgtgaaaggaaaataaattttgggtaccccaaatcactaagctaaagggaaaagtcaagctgggaattgctctagactaacctgcctcccattctattcagtcacccctctgctcactgagacaaatgcatatctgattttctcctttggagaggcaaatcagaaactcaaaggaacacaaccattggtctcttacctacctatgacatcccgcctttgcttcaagttgtcccgcctttcccagaatgaaccaatgttcatcttacatatgttgattgatgtctcatgtctccctaaaatgtataaaaccaagctgtgctctgactgccttgggcacatgtcatcagtacctcttgaggctgtgtcatgggcgtgcatcctcagtcctggcaaaataaactttctaaattaactgagacctgtctcagatatttagggttcatgaagctttttgatctttggatttggaacttacatttcctaaaacactttcgtttgtaggcaatagaggcttgacaaactgatttaggcaaaaagtaattttagtttcatagaacaggaaagtcaaatgagtaccttcaggtaatactggatacggacattcaaaaaaagtcagcagggttctgtttctttctctctccatatcttagacatgtctctccatacttcttttctgtgatagcttccagtagcccaagacttaacatagcaaactcagcagcccaacaaaaaacatgttccctaatatttgtataaaacatgtatcaaggagtattttgattgctttacccagcctggacatgtgtctatcttgaatcactatggccaagaatttggggtactttactagacacatctaggtcacatgttcacctgtgagactagaggagagggccagctgggttagccccatacaggctccagaatagagaaaggttatgttccagaagaagagggacaaaccaacatatgtccatcactgtcctgtagctgatacctccttctagactcagtcagctcaaaggttttgcctgggatccacatgattctagatttcttcttggcctggcgcagttgctcacgcctgtaatcctagcactttggaaggccgaggcagacagattgcctgagggcaggagttcgagaccgccctgggcaacatggtgaaaccccctctctactaaaatacaaaaatttagctgggtgtggtgacaggcacctgtaatcccagctgctcaggaggctgaggcaggagaattgtttgaacccaggaggtggaggttgcagtgagccaagatcacgccactgcacttcagccaggtcaacagagactccatttcaaaataaataaattaattaattaattaagtagatttcttcctaccatcttcttgccactgttctcgtcctgcagtcacttcagtacgttccttcagtgtctccccttggctccaccccttcctgcactgccaaagtgtaattgatagtttagtaggcagaaagagagtgggcatcccaggattggggaagctgatttaccttctgactaattcaaacctagggtctgaggtaactggagcaagtccctggtgatgccacacaagagaattctgcttctaggcattcctttctgacaggaaagaaattcatgctgagcttattaattggctccatcagcctgtcaaaaaagcacttggtagttactctaatcaagtcatttgttttttctagttgagatcagttattctccaaaatcttcagaaggcactggattcctctagccgctgaaaagatgggttccttgaacaatacaagtgtctaaaagtctctgtttgccaaatttgccagcacttggtgaatgcagtttttctcccaataagagaaaagcttctcaagattgtacactgagagtttcaagaataaattctagatataatagagctctagagccacctacccctttccagacccttgcctcctcctaccaagccacaccagagcttctctgaaatctcaacccaagccagaatttgtgtggaagacttcctaaagtactttggcctgcctgagcattcgtgaggtcagtgtcttcttctgcttttctctctagcacttcctaggatatatttaacactcccatgatctcatttattaataatgtggacttacaactttacagtttgcaaataacctttttcaagcattattgtggataactttcccaaaagcaaggagagataaatagaactattgtgctctaagaggagagaaaactgagattcaaagagtattatgtaatagcttaaggttacatggctagtaagtggcagagccaggtctcaaacttatgtcctctcattacaaattccttaactttttgttccgtaacacagtctctaattatatcctgttggatgagtttgactcccaataagtctgctaccttgaggatacaaggcagatttttgttttgtttgcctctgagttctacctgtagaaagctagcatagctctgtgtgtgtgattggtattccaaaataatttgttgactgagggaataaaccattggccgctgtgttcctggtgaactgagttgtcttgggaattcagctttgtaggcagggtcttactgtcaactctaagaaagggaggccataccttcattagcatctggaggatgtgcaaagtgaagccttcctgtggtagtggtgagaattgatcattcacacaaccattcattcaaccaatactattttctgtcttctatgtaccaggcagagtgataggtgctgactataaattgatagataatatacagacacacccaacccagaagagcttacacctctttgagggtcttggactctaataggagtcatctaatgatgatgtcttcattgttctcacctgtattcattttctactgatgagtaacacatgaccacgaattttgcaacctaaaacaataccaacttgttaactcagactgtgaagactcacctgggttatctgccaaagttctcacaaaaccaaaatcaaaggtcagccaggtggagttcttatctgaagcttctgaggaagaatctcccttgcagctcattctggtagcagagtccagttccttgtggtcgtaagattaaggtccctgttttcttgctggctgccagttggggttttctctcagttcccgcaggctacccttaggtcttttccatggggccacctccacctttaagtctcatacttcccctttttctaccagctggagaaagctctgctcttaaaggattcatgtcattaggccaggaccacacagatagtctccccttcttatagtcaatctcccaatataacatcacctgctcaccaaggagcactcacaggggagaagattttacaaggcatggatcactggggtcaccttaaaatctaccagcacaccacctctgcccaatttcagtcacttaatcacttcacatgggcatttgccacaatctaacaagtgtgtttttccctgtcctgtctcatccatatttaatcagaggtcacaacactatacctttgcatatgcccgtctctcttcctggaatgctttccttgatgcttatcctccaacaaaatcccctttaaacttaatcctccttaagactcaaaggttacaccctctgagggtcttctcagcacccagccacccatcagagttaaataatcccttccctctgttttttatgagacaatccatctcatcacaccagaatctaatccagactattatcgtcttaaacaccagactgtgaggtctctgacatcagagtttgtgtttcattcatctttggtttcccagggcctcccacggatattggcacatagtaagtgctcggaaagtgtttgtcaaatttgaattgacctgaactttctatcctctgttctgcggattcatgattggaagagcagcacagatttgaagtctagtttggggcataaagtaaaatatctgcaatttttacctcccagcatggattatttggtgttctgattattgaaccctaataagccattatgaaaccacaacacccccactttccatccatgcaatcaacatgggatttccttactaccccatccaagtatagactcacctatgactcaggctttgctaataagaggcaccgtgattgattccaagatggacacctgatgcaattcagctgatgacatgcctttcatcctcttacaccctttgggaaagcagttttctctttccgtcggacttgtggagctggtaaaataaagacttgaagcaactagtggctttctctgccaccctctaaaggaaacctcataatgaaccaacacagaaaaaataatagaactaagagatgacaacagagaaacactgagtcctgaagacatcatgagccactggactgagccacgcctaaagcttgtcatcttttgaattggccagtaaatgaaatctcttcttacttacatttccactgacacactttcccgtttattaattagcgttgggtttctgttacttgcaaccaaaaccaaaaccctgaaaaacacaagacagtaatctctaattatggggaaaaaatccaaaaataactaaccccttcttacctcattagtcttcatgaaaactgaacaaatggggtcattggaaatgccactgcttccaagctcttcaatactaacctgctcaatcctttttactttgtgttggaatgcaaagaccaaggatttggggactgatactgtaatgagtaacagaacagagagtattgttcattactttcagaagcagcaacttaagtcttgaagccaagtttttctaagggaccccaggtgtgcaatttgcaagcaaatgacaatctacatgactattgattgctttgaccagctaattatgagtctgtaatttcctgggccctaggatttctctcctatttcctatattggaactccccttggatctcatttgtttgccccaaatgatccctagagaggaacttctcctctcatcagccttccccacgtccttctccatcctgctggcctctcaataactgtgtcaccagatttcaaagggactttcagcttattgcataatcagttcttcctctgagacatcccccacccccatcattacctcagggtgttggaactttgctgtaagctgctcacagatcattaaagatcccagctgttcctggtccataacaacccctttcaactgggtctccttccaggaacagctgcaaaagctccagaaaggaagggaggagacacatttagcatgataacaaatcagtagggagtggccagtttacccagaaaggctgtgatgcagttatatccacccagcaactctccccaccctctaggagagagacaaattcgtgctgcctctgtgtgaaaactcttcatatctaaaggaatgaaatcaagaatcacaacccacccctgctccctggagaggaacctggacaaggttcttgctttttccatcatcattcacaaaaaggcctgtcagtggttacaagaagattattatcttgcatatacatacatataacatatactcacaccaaattaacaacatggaagaaggagctgtcatctatctcatgcagggcactgtgcaaagagttcaacatatgtttgcaggctgggcgtggtggctcatacctgtaatcccagcactttgtgaggccgaggctggtggatcacctgaggtcaagggttcaagaccagcctggccaacatggcgaaaccatctctacaaaaaaatacaaaaatagtagctgggtgtggtggcacatgcctgtagtcccagctactcggaagactgaggcaggaggatcgcttgaactcctgggaggcggaggttgcagtgagtcaagatcgcatcactgcactccagcctggacaacagagcgagactctgtctcaaaaacaaacaaacaaaaaaaccagatatgtttgcttgtgaatccttctttaaaaacaaatcacttattgataaggaaatcaaggcacaaggagattgaataacttgcccaagtttgcacaactcagaagtagtggagctgggatttgaactcaagtcgatctgactcaagcctatgctgtcaactctaatcccattccaatataagacccattcaattacctaattggtacagagtctgggatttagtgggcaccattaaagtttcatttaatgaatttattttaatgaaggcaaattcgtgccaccattcttccgaaatgcactttaccccaatcactttatctacctggaaaacattgaatgattgtgcaagatatatcttaattttcatgtacagtatacaaagactttacaagaagcccctttcccttgttcagtggacagtcttagtcattccctccacattgtctctattattgcctatgtggcacaattctgtatgtatcaaagactttagttgtctgcctaccccatgagagctaagcaacattgccttgaactttctcctttcatggcttcaggaaatgctccctcaatatttctgctaattcccaagggttttacatctcctcctctgttctatctctcaagctccagcttcctctattattgcttttgtctatcactacaccacttgggaataaaatttaacacctttaatttctattatacatcaatgtcagtttttcatgcgcctcgtaatttggaagggagggcagcaaaaggagtcaagtagtctagcactccactttctaccatcttgtttgctcctacccttacccctctctgcactcctcttataagcaatataattcctcaatttcttcacacaatgtatacagagcaatttccccccaaattctggtaccaactaacatccaggccttggaaggaaggaacagcaagagatgagagtagagtataggaaaaggggtggggactcaaatcataccaaaatccctcatgtatttaataattatttcttgagtatcccctatctgtgagctaattaggacacagagatgaagaaaaacaagatgtctattgttatgaaggttacatcctagtagaaggaacacaaagcaaatgaataaacacagtcctttccaactgtgatgatgtgaaagtaacctgtgaggtggatggtgactaattaaggtagagtggccaggcatggcctgaccttagaggtgatatttgaactgagagttggagaggtgaaaaatcagccatgccatgaacttgagacaagggttataaactgaaagaactataagggcaaaaactctgaggcagcaacaagcttttgtgtgttctggaaaaaaaaaagtgagaaagtagccgtaaaatatgaagacagagacagatagtggcagaacacataaaaggtttttttcttcactccagcggaaatctatgggatatttttgacatatgagtgacccgatctaatcaccaaaacattttttttcaaacaaaataaacacttcttcctatttatgcatgtattttccttaccagactatgagttccttgaaacagacaggcattggacaagttacctcatataaaatgatgaaatgacatagacatagctttatgttttgcattcttctcatttcatgttttacaaatgaaaaatgcttgaacaaatgaataaattattattaaaaatacatgcttaacatgcatttcaatatttaaatgtatatataaagcaaagttgacagaaataaaaggagaagtaaacaaatctgcagtcatcatctaagggttaaagaaaagtcatgagaaaaattaaaaattatttaaactgaatggcaatgagaatactatatgtcaaaacttgcgatataaagcaaaaacaatgcatatattagaaaaaaagatttaaaattaatgttctaaactttcatttttaagacactaagaagtaaaattaaatctaaagtaagtagaaaaaaggaaataataataaaagtaggtatcagtgagctagaaaacagaaaagcaattaaaaaatcaacaaaggcaaaaaaacacatgttttaaaaatattaacaacttgttaaaccccaaacaacactgatgaagaaaaaaaagatagaagacataatatcaagggaaaaaaagcagagccatttttgcaatttctatagaaattgtaaggataatgcaataaatatatcctacaaaatgctcttagccagaacatgtaaatatgtaaagaattactacaaattaataaaaagaaaaacaaataatccaatttttttcaaaagtaaaaacattaaaaggtaattcacataagagaatacacaaatgtaaattaacaaataaatgtattagtcgtcaagaaaatgcaaagtaatggcaaaaactgcaattacttttgcaccaacctaatactaccacacctacataaggataactaaaattttaaaaactaacaaaattaagtttgggtgaagataaagaacaaccagaatctgcggacactgctagaggaaccacaaattaatacccttttaacactgtttattagtatctattaaagcaaacatatatgtctctataactcgtcagttccaatcctgtgtatacacccctccaaaaggtgtgcttatttcacagcagctctgtcatcatatcccctaactagaaataccaagagcaggatggatgaatctcacggagagtattagacaaaagaaactagacacaatcagcttcatgctgtatgaatccatgtctatgaaattcaaaatcacaaaactaaaccatagtgctagagatgtccttccaggtggtgtgtgttggtagtaagagtcatgaacaagccttctggggcactggaaatgttctatgtcttgatctgcatgataatcccataagtgtgcatagatgtaagagtttattgaatcctatgcctaagatctgtttacttcactgtttgtgaattaggcctcagttaaaaggtacaaaacaaaagttatgtattatttaaacattccttaaacaaacaaaaacaagttattcattaaagcaatagtcacgctgcatgcagtggctcatgcctttaatcccaacactttgggaggccaaggagggcagatcgcttgagcccaggagttcaagaccagcctgagcaacatggtgaaatcccatctctacaaaacacgcaaaaattagccaggtgtggtagcatgcatctgtagtcccagctacttgggagaccaaggcagaagaactgcttgagccatggaggtcgaggctgcactgagccatgatcatgccactgctctccagcctgggccacagagtgagaccctgtctcaaaaaaaaaaaaaaagtcatgtaataataatatagctgatttctccccactggcaacatgctcccccagcataaaactatgaccaactcataattagacttttacttcttggagcctactagatgttcaatatataattgttgagtttacagaattatagtaatggaagggcataagtttatctgtttccccttttagagagctctctctaactcatctgatggtgcagtccagatggtatatctctaggaattcattgtttccactatgttgggccaataaattatgccagctaccacatggagatgttcaagcttctgaaagtaccaacctcacatgagcttagaagctggcagacacctgggaatgctgagatgtaacagaatgtccaataatgtgaagtgacgtcagtgaatgcttgggaaggtgcaaaacataaatagaattcaaaacagtaagacaatagtgtagcaaaagtgaggtgactttaagaacttcaaaatgaggttagtctctgaagataaaactgctaaaatctatccctgaaatatgagccatttatcaatgttgaccaatcagttgttagagtttggggaaatgctcaaattttaatcaaaatacttagggaatagcctcgaggaagcacagatgatactagtctacctaaaactgcatacacacagcatcagcttggcacattaacatgagctaacttatcagagaaaaacaaattgatttttggtaatttggccagagctgacacttcatcaactgcattgactctcgttggaaggaaaggatgtgcaagcatggcggggatgatgggcatgcccggggatgacgggcaggccatcctaaagggaaacagtgtatcagcatttaccagccctgtcttgactttggatcaggaagcagaagtattctggttaatagaaaaagttgactgttgagggataagtggagttttctgtatcattcttgcctagctacaatcactttgggttagaactacctccctttgctctgatccctttactcagaaatgtcctgggaaatgtagagaggccttgtttaatttcccatgggaagccacatatgaggaacgaatatgaccctgagcaccaaggtctggctgctcatcatggttattaagtaacatttgttagttattctgagcagtcacttactgagctatattactcaggataggccgaaagtgctgtttcaaaaaccctgaatctcagtggtttaacccaataaaagtttagtgttttccctcacttacggtcatgcatgagtcttgggtgggaatggatgaggaagccctaatccacacattcaacgaggaacctaggcctctcttatccttgacaccatcgtcccccaggtcctcagagatctcttatttcaattgatagattaataaagagagaaagaattgcacatagaaggtttgctgggccagtttgaatggacataaaatgcgtattcacattccaatggtgggaagtgattcacatggtcgcatctgactgcaagagaaattgagaaatactttctgagtactcagaaaagagagcatagaaattgtcatgccctaataatctctgcctgttgtactaaatgttttatattaattatattatgtaatccttatcacattccttaaacggtggtagaatcagagtactgtaatcttacaggagaggaaacagaagtatagctgggataagtaactcgctgaagaacagggaactaattgtatttgagccaaagcaaggttagaacacatctctggagttcctgcttttaaccactaagataaactatatttattgtggcaaattaatattaaaatattagccttcagatttataagtttcagggcatttacaagacagtgagtttgaactggaagactagattctagaatacggtgaccctccaaggcacttcctcctctgaggccatgatgaatgtccagccaagcctgcagtacatcctgtctggacaaactaaaacaaataaggatatgagttaagagtaaatgaggacttatcaccaagccaagctgaattcttcaaatcttacatgagttgaactttttaaatccctaccacaactcaatgaaataggtactattatgaagatattgcaacacagagagattaagaaacttgcccaggaccacacactcagaaaggcccggagccagagttagatccaaggcaacttcagttctagaatacgttctctgggccactatgttaaagaaaagttcaacaaggatgacattaactctgttggtatactgttttcatccacggtgattcccataatcacccacatagaatgaaaacttgatgtaactcatgtatcatctcctcttccaaggaggacagggcacttcttcacacaaaaaggtacacgggaagtatttatgaaactaaaattatttaagttgtattaaattgaaggttgtaacatggtgccctttttcctctcatctatatccatctatatccataaaattaaagatagctaagtattttatataaattatctcatttaatcctcataaaactcaccaaggatataattttacttccatttaacaggtcataacaccaggttttatcataaagaaacaaagtctgataatatctgacttatatgtgagaacaaacttcctaacacttttataatgatttctgaacatctctctaaatgatgagaaatatcctactctggcattccaagaatataggcggttgaaaattcaggactttgctttcacaattctatcttttttacttccagggaagtcatttccgtgaagcactggtgtgaacaacagtcacaagtgggaagagcaatggaacaaggaggaggaggaatgaaatggtcctataattttagaaagagtgtgaaaaaaagaagttagacttctaggttctatttctggctctgcttctgttttcaagccagccagccatctttctacctttttctccattaattgccaaaggtggagaagaatatagactgagtatgaagcaccttgtcatgcttggatgaaagatcctgtattatgacgagcgcaaaaccagaattgatcatgttgtgaaatccacactgtgttgtaatatattggtttcaagcttttcaggaatacttttgctctgaattcataaggttagagaaggcaaaattgcattttaagatgggaatgccaaagatggatgtagcccattgaaaacaggcaatggctttgagcaaagctagccccacaataacttgtaatggtagtgaagtttgtgatccatcatatgatcttttcttcctgccttttttcttcctcattaaataacccatttccctaagtaccagtttgtatatattatctttattattatttgtatatgtgtaaggagcacaaatgcaattttattacatggatatattgtgtagtggtgaagtcttagtttttagtatatccatcacccaaataatgtacattgtaacccattaagtaattttttatcatccaccctctactcaccccccaacccttctgagtctccaatgtctatcattccacactctatgtccatttgtacacattatatagctcccacttataagtaagactatgtggtacttgtctttctgtttctcaattgttttacttaagataatggcctccagttccctccatgtttctgcaaaagacatgatttcattttctatgtccaaatagtattctattgtgtatatataccacatccaatcatccactgatggacacttagattgattccatatctttgctattgtgaatagtgctgtagtaaacgtatgacaactgtaggtatctttttgacataatgatttctcttcatttggatatacacctagtagtgagattgcaggatagaatggtaattctatttttggttatttgagaaatctccatactgtttccatagaggttgtgctaatttacattgccaacaacagtgtgtaagtgttcccttttctcctcatcctccccaacgtctgttattctttgtcttttcaataataaccattctgactgctgtaagatgatatcccattgtggttttaatttgcatttatctgatgattagtgatgttgagcattttttcatatgcttgttggccatttgtatgtcttcttttaaaaagtgtctattcatattctttcccactttttaatgggattatttgggaattttttgttgagttgcttgagttctttgtaaattctggacatggacccctatcagatgcatagtttggaaatatctttgcccattctctaggttatccattcactctgaggattatttcttttgctgtccagaagctttttagttcaattaagtcccatttgtctatatttgattttgtggcatttgcttttgaggtctttgtcactgaattctttgcctagactaatgtccagaagaattttctctaggttttctcctagtatttttatagtttcaggtcttacgattaagtttttaatctatcttgagttgattcttgtatatggtgagtgacaggttatccctctcaagaatactgcgtattcgaggaaaaagaattccaagaaagaaactgtgtggacagcattgtggcccattaactatccttccagtttgatattcacataaatatcctcctgttgagggaggatggtaaaggagaagtagcgctgaag

SEQ ID NO: 26 - DNA, 150173 bp, Homo sapiens
ctgtggcaaaaaaatttgttcaggtatgttgatagacagtctttcttcctgtgaagtgagttcatttaatggaaacgccaagagaccaaaagtaattgttcaaaatttcttctttgagggttctggacttttatctaggaacttcagataacaattttatcctttgttttgggagagacagaagactgaggggcagggtggcgggggtggaggcccaaaatacctagagacttcatttcagcaggtcaaagcacgacattttggggtatcgatttctgagccccaataccattttgcataggatcagactttttgattactttttaaattgtaaatatgttggctgggcacagcagcttacacctgtaatcccagcactctggggggccaagataggagggtcacttgagcccaggagtttgagaccagcctggacaacatagcaagaccccatctctacaaaaactaaaaaaaattagcctggtatggtggcttgcacctatagtcccagctacttggaaagctgagggaggaagttgtcctgagccaaggagatcagggctgcaatgagctacgattgtgccactccactgtagcttgggcaacagagcaagatgccatttcaatcaatcagtcaataatttcaacactccatgaatatgattcctggtttttcctggaggaaaagtcaatattggccttgagagagagagactatttgccacccagcattcaaatttctcagtttttgtctttgttctgttgactcaggaaggtaaactgaggcagcaactcatcattaccacctcgcctcattctcctcctacttcctcagcatttgggaacagtctctggagttaagtcttgggttatgtctctacagaatgaataaagaactcttctgtgttttgtttatcagagccttggcattgcttatagatttttgtttctactaggactcacagtactttacaggtataataataaaataaaaatcaatcatcaaaattagaacaaatattcaagctagcaaacactaaaatgagacttttcttagtattttattcttaaaagtaacacattgttatgaaaaatttaaacagtaaagaaaattaattaaataccaagtctgtctactctctatccctcctgcacccaaccactccccaaaattccatttgttgacagtttactatatatctttctataattttttttttttttttttgagacagagtcttgctctgtcacctaggctggagtgcagtggcacaatctcggctcactgcaacctctgcctcccaggttcacgccattctcctgcctcagcctcccaagtagctgggactacaggcacctgccaccatgcctggctaattttttgtatttttagtagagacagggtttcatcatgttagccaggatggtctcgatctcctgaccttgggatctgcccgccttggcctcccaaagtgctgggattacaggcatgagccaccacgcctggcctattcagttttctatatatcttttcagatattttctatacaaatacaagcaaagatggatggatggataaacagtttttttaatgccaaccatattgataatgttgtcatggaatttgcatttttcagttaacatcctcctgacattttctgtaaattagacctatcagtcaggttttcctacagtaatgttatgcaataaacaaccttaaaatctcagtgcctcacaataagtatttatttattgcttatgtcacatgagagttgcagtgcatctgttgttctgtgggtttggtttagctgggctcatatggctctgccctggtaagttctgcccaactcatttttctcattttggaatctaagctgacaaagtagccactgtgtgacattatgcccatgtgatagagggctggaacaaagggcctcagccaaggtaggcaatattttattttattttattttattttattttattttttttatttattttattttattttattttattttattttattttattttattttattttattttattttattttattttatttttttgagacagggtctcaccctattgtttaggctggagtgcaagggcacaatcttgactgactgcaacctctgcctcctaggctcaaatgatcctcccacctcagcctcccgagtagctgggaccacaggcatgtgcaaccatgcccagctaatttttgtatttttttgtagagacaagctttttccatgttgcccaggctggtctcaaagtcctggtctcaagaaatcttcctacctcagcctcccaaagtgctggagttacaggcatgagccactgtgccgggtggcagtcaaattttagaatgtggcaaatatcacacccattcttatcccatggtcaaggcattttatatggccaagaatgaagtcaatgggggcagggaagcatggcaaggatgggaagtaattaaataattgtaaagaaacaatatcagccaggtggagtggctcatgcctgtaatcctagcattttgtggggctgaggcaggaggttcgcttgggcccgggagtttgagtccagcctgggaaacacagtaagccctcatctctactaaaaataaaaaattaggcaggtgtaatagcatgcatttgtggtcccagctactcaggaggctgaggcaggaggagcacttcagtgtgggaagttgaggctgcagtgagctgtgattgattgtgccacttcattccagcctgggcaagagggcaagaccctgtctcaaaacaaacaaacaaataaacaaacaaaaacaagaaacgatgtctcctactacatttgtacctatgccccattcttctgaatgtctgcatagtattttattaagagacatatcaatcgtattatttatttttgcaatcaatgctgcaatagacatccttagaactttaaggatatccttaaatacttgtggaaacacatttgtagaagtagaattacttgaactaatggtttatgaatttaattttttaaatattcctaaattgctctccaaaagtatgatatcccttaattctttcccaagatatatgagatacatgtccacaaaccctctccagactttgtattatcaaacttttaattcaaaaggtaaaacattaatgtttttaatggcatttgttttgttaatgatgcagtatttttaagtgtcctaaatttggagataattctatcacagtcccagaatttggattcacccagatctcttggaaaatatcttaactacattaacaccaacccaacatactcaccacccacactatgtttctctgtacctttggttttattctggagaaaagcagagctaatcagcttgctctatgatatggtttggctctgtgtccccacccaaatctcatctcaaattgtgacttctcccttgctgttctagtgatataattctcaagagatctggttgttttgtacatgtgtcgcccttccccttcgttctgtctttctctcctgctgccatataagacgtcccttgcttccctttcaccttctgccatcattgtaagtttcctgaggtctccccagccatgcagaactgtgagtcaattaaacctctttctaaattagccagtctcaggtagtatctttaaagcagcatgagaatggactaaaacatctctaaaacagagacattatgaaaggttttcaactggagaaccaagtcctataacttggtcgttgctatgtttagtgccttgatgagaaagactgtgaaactgaggacaggctcagcagggaagagggatgtgatccattcttgatgtgtgtggtgaactcaggaaaggcggcagcatcatgtatagtatctatttaccttccccacccttgaagctgctagaactctatcagcattttcatctttctttgtaccatttggtctgtcccaaatcacagaagataaatattgagcaagcagatgagcagaaaaacaacttgggctctttcccatgcctctactacctgtctgtatcacatgaagctttttgaaaaaggtcacagaaaatgattttgaaaagaggcccagtaaatattttggtaatgttttggtgtgggctttgtttggcctttttgtctttgctgaactccgtggcttgggcttttaagatacttttaccgtcagagtaatattattttgataacccacttcctcgtgatgtttgaaagatggttaattattgtagggggtgtaaatacagtgtcaaagtaaatcattacaggattctttggtcaggctcaaggttaaaggcaaccacatttcccaacaacagagcaacataatcattccttttcccacagataactacagtcttcctgtcagcctacaggaatcccatcccctttcctccagtgtaaccggactccctgccacagagaaacaacactctcctcttcagctttgccacagggtaatcagtcattggtacaccagcttgatccccaaatgctgcagtaaccacagaaaccacacagaatgtggactgaccacgtggttgtggacatagtcatcatttttaacacagagagatgaagtcactccatcttttctctgatgcagtaaaacattaaaatacaacattggaaacaaatgcttttccaatgtagaaatgtatgctgtaaagccaaggctccattctacatccctgagtaagggaaggaaagaccaatgagacaaattcctgagagcccgttaaaaattggtgtaacccattctcagagaagataatggggaggtgacactaagggggtacagaagattgtcatctgcagaaaaatcaggcatgttttcccagaagagagaaagattgaactacctcaattgcaaaaatgtgggaaccccaaagaaagagatacagcaaattcaaaagcattaagaaataataaagaaaagaaaatcttggctttaaagtggcaattttttttttctagtgactgaacagtaatcttctaaggagaatagtgagagcccctccccaatagagttttaagctttcactgtgaaaaggctattcttggctcagcaacccagctgatttattctcaccttgaggcagttctgtaaccttgccttctacctcagcttcccagtcagccaagtgggacttccgacttgcaatctgcttcatttgctaggatgtcatgaagattaattaacaacattaatatactaaatgttctttgggatgggcagagagaaagtgtaattatgaccattattgctctgggttactaggcagagtattgagatggttgcagggactgtgcttggaagtagaaaaacaggccaaacggtgatctttgcatggtttcaaatgcccctggcctgaaagtacttcctctatattcttgcccagggacttaaaatgttcacaattatgctaatatagcggaaagtgcgttggacttggagtcagaaagcttgtatcccatgctgtctttgccacttactggctgtgtgatcttgtacaaactacttaattgttccaagtctcagtttcttcatctgtgaaaaatgcataaggataccaccaatgtctatatgccttacagtgttcctgaaaaatctaaatgaaatgtgaatatttctaaaaattggactgactatacaaagataaaatattattatctcctagaaaaaaaatgctgtaaccattataggctattttatcccctactacaagttagtttatgagacacaatccaccaacataagtacatctaagacagacaatttttggctctagagaaagatcagaaagggtaatatggttgtaaaactgaggacctcagttagccaggcatctatgtggggtgcttgggtgtcagtgagaagtcagggagacatcaaataggagctgaaccttttgttgtttcctgatgtgaggcctccctacagggaatggagggcaaacttgtaatgacttacaatctttgtatcttaaaatgttagtcctggaaaggaattagagatcattctagttcaattctttcattttacaaaatagaaaactaagcctccaccttaccttgaaaattcccttcttcctgatgcttagaccaggattatttccattgcacaccatctccaatatgcaactagttattaaggtctgtgggtgcacttgcattgaattattactcatacccacatcttcctgacctgggtccaaacccccaacattataagtttggactagtacaacaatctcatagtctatcttcctctattttttttctgacccctaatcttctctaaacactgatcccagattagccttctaaaagtgtccactgaataatgccttatttgctcaaaaacccattaatggctgctgtgtacagaagagtggtagcaatacctgcctgccttatctgagttatggtatattctctgttcctaaggggatgacactgtatgccatcatccctagtgttccagttctagaaagggattgacaaaaatgataaatgcaccactttcctgggtttgctgttcatcttaaaaagaaatccaattacagtttgcaattgcattttggtaaaacataatgagctctccttggagttgccttattcagatcaaattacttcttggtaatttaaagtacattacatctcccagatacctctcaatacacccacagtgtttgaggccttgtgtaactattgcacaaacactggccagtcaactctagatgagttcataaccaaaggattattacatgtttacccacatacaagtcactcttcatttccctcatgcagggaggtcaaaggtcatgtaactctgccagagcaagttacttctcagggactgaaaatgagagttaaggagagctttcttctaaaaacattactgcagagaggtctaaatgtgtgtgtatgaatgatcaacattatcagtcaatgaactttctcggtcagttactctcatgtattgacataaatgacactgagccatctgatgactaataaaaatgacaaaccctgaaacattgaccaaaactcacaagaatgacatttcctaaagcatttccatttatagaaaaagttagaaaaaagcaaagaggaaaaaaaagtatatgatgagaagctgtaacagtaagagaaaagaagtagacctgaaactttataaaatggcacattgtcccctgatttctccaagaaagttcaatatgtaaaatgtcaacagatctgggtatcactaaaattttctccactaatttctacaggccagaaaggtcatctaagactttaaaagtgcagaatgatgtaagttttcgggagtattattcagccaagagtctcatcaagatagctcccccccactccccatgcaatgagaacaatagccctcaagagcttttactcttgacatttgcacctttatttacaagatggtatgtcatttgggctttataaactttacatttatcttctttttgtttgttttttcatttttctctttatacacactatatcaatgtatatatttagaattgtttttctttttcttttattattataccttaagttctgggatacatgtgcagaacgtgcaggtttgttacatacgtatacatgtgccatggtggtttcctgcacctatcaacccgtcatttacattaggtatctctgctaatgcaatccctcccctagcctcccacccccttacaggccccagtgtgtgatgttcccctccctgtgtccatgtgtcctcattgttcaactcccacttatgagtgagaacatgcagtatttggttttctgttcctgtgttactttgctgagattgatggtttccagcttcatccatttccctgcaaaagacatgaactcatcattttttgaggctgcatagtattccatggtgtatatgtgccacattttctttatccagtctatcatcgatgggcgtttgggttgtggaatttaattaaactaaagagcttctgcacagcaaaataaactaccatcagagtgaacaggcaacctacagaatgggaaaaaaaattttgcaatctatccatctgacaaaagtctaatatccagagtctacaaggaacttaaatgaatttacaagaaaaaaacaaccccatcaaaaagtgggcaaaggatatgaacagacacttctcaaaataagacatcatgtggccaacaaacatatgaaaaaaagcttatcatcactggtcattagagaaatgcaagtcaaaaccacaatgagataccatctcatgccagttagaatggtgatcattaaaaatcaggaaacaacagatgctggagaggatgtggagaaataggaatgcttttacagtgttggtgggagagtaaattagttcaaccatcgtggaagacagtgtggcaattcctcaaggatctagaaccagaaataccatatgacccagcaatcccattactgggtatatacccaagagattataaatcattctactataaagacataggcacatgtatttttatttcagcactattcacaatataagtttttattaagaaaaaaaacagagcctctctgtaaaattaatccttggttctgacattagctacctgtatattcttttttttttttttaagaatatttctttctttttttttaggttttgtgagggtctttttttttttttaacttccatagattattgcagaacagatggtgtttggttacataagcaagtcctttagtggtgatttgtgagattttggtgcacccatcacctgagcagtatacactgcaccctatttgtagtcttctatccctcacatttatcttctgatgactatctctatctctgctagttttaagaagaagcctaggggctgggcacggtggctcatacctgtaatcccagcactttgggaggccgaggcaggcggatcacctgaggtcaagagttcgagactagtctggccaacatggtgaaaccccctctctactaaaactacaaaacttagccaggtgtggtggcaagtgcctgtaatcccagctacttgggaggctgaagcaggacaatgcattgcttgaacccaggaggcagaggttgcagtgagctgagatcatgccactgcactccagcctgggcaagagagcaagagtctgtctaaaaaaaaaaaaaaattaggctggtgtggtggtggatgcccataatcccaactactcaaaaggctggggcaggagaattgcttgaacctgggaggcagaggttgcagtgagccgagatcatgccactgcactccagcctgggtgacagagcaagactccatctccaaaaaaaaaaaaaaaaaaaaaattaaaaaaaaagaaggagtctagggtgtgaaggatctttgcacaacagagtcaacttcccttgtactgctcgaatcacatatataccatttctgatagataatccccaaatgatgctttaacatttccaatgattggcaacatccattgttagcagccttttgggcagaagatcaatttgattccaaattaaatttgtgctcttttctgtctacagaaaagaaagcaaacaataagttagcaatactgtaagttggagagtcgcaattaggtgactcctagaaacagaaaaataaattgccttctatgactcagaatgcaaaatagaaactacaggtcagaacacatgtatatagagaaacttgatggagacaggatggtttctaggccaaaagaaggttgcaggaacctatctgaatgtataattgtagtttttagattatgtcagtcttgggattgggggtaaagaaagagatacataagttggtacataagtcattcaattatgaaaacaagcaaaaaaaggaagtcaccagggccaacattgtcagtgcccagccaaacaccgtctagggagaagagggcctttgctattagagcattttaatctatagggcaatataattccagtggagatggataaagactggattttcgatggctctctgattcaattaatttatgataaaatagaaggctaaagttaacataccttgatgatataaaatatctgtattatcttgttccctctgccaggatcatcagttagacccatctctatctcctttttgactggctcatgatgttttccctctcagatctcagatgtgaagtcatttcctccctggaagtcttttccaatatacctaatccagatttgttgattctcctatatatttgcattgcattctgcacttcctttatcctatccctccttatctagtatatcattatctgcttttaggtagttaagtatctccttaagattcctaatatcagggcctacgtattacagaagtctggtccatatttgtatctctcaattttataatttgcatgacaaacaacttgattctttccaattctatttgcaagctttacaaagtttcttggggaaaagaagaggtgggatgggcatttgaagttgtgagttaatctgatcattaaaattatgaatataaaaaaattattttagcaactttcaaaggttctgttgaagacttaactgcttttgctgcgtatacaacctgttagaaaagaaaatgaatgaaagaactgaaaaacgctctcccaaattaccctataagaaaggatgataaattttaaaatgagatggtagaaagaatgcaatcagaaagcaatcaagcaggttccactggtaaggaatagagaaacgaatggtaagaattagaagacgagaaggtaacgctggaggaaagatgggtagagaaagcacagcagagtgccttctggcaaagaaatgtcaaaccttctgatgacataggaccattttatgctgactgctaataatttaaaagatcatactttaggaaggaatgatgctagttcctcaaaaaggaagaaactcatcaaggtagtttgtaaagtctaatgggctcagacctggccgggcaactgggtgggtttgtggtcttgaaacatacatccaggatgtggcaaagagtctgacaagactcagcaagcccacaaattgctactcacttttgatgattaactgtggaaaaatgacaaagttgggggaaaaaactgaaatgtgtctctcaaaattccatggttttggttagaaatcaaaagatgagcaacgcctttatccctctttatcccttcttccagttatttttgagactgaagaaagaaaagaagacttcaaagtttaagctacacaggacaaagacagtgcccactgtgctcatcaccataagcccagagcctagtatggaacctggaaaacaagtacttctctgattgaatgactgcagacagtgaataaatggctacatagattatataaaagacgatgagtttgtttactggtttaactatggtttaagtttttaaagtagaaaggcagaatacaaatggggtaaaaactgcaactccagatttcagtgaggacagagtttaaagagtacctcattcgtttaataagttttaatcaataatacaaagagaattgcattctggcatactaaagaaactcacaggtataatctcagcatgattgctaacattcaaggaattatgaaaaatgaaagaggcttcaaaagtatagagataggaaaatattactgagaatattagaagtggggaaggtaagttggatattagaaatgacaaatagataagtttgatgttcatctataccaaattaacaattagttgttttctgaacatctagaaaagatgatggtgattatgaggagccatcagtaaagaccccccaaacaattctaaaattagcttgaaagtatatgtgtagcattattaatgaatattcttaaaatagctatgaagagaaattagacttatgagatctgttttaaaactttttaaagcagtaataatggaacccatatggtaatatttcaaaattaagaaactcaatccagggaacaggataatttaacatgtgatttaaaagatactgctataaaaaatggaagtaggaaataccatatgatatatggggttaagataatagtaacaagagaaaataacatagatatgtttcagtaaattccaagaatcttaagtgttttaattagtcaaataaatccagaagacacagattaaacatttataccattaagaagagatgatcactttggagagtttgagtaatcaaatatacattttatataataaatatttattaagcaactactctgtagcaggtactattctaggtattagagaattactggtgaacaggatatccagggtccatgctgccaagaagcctatattctagaaggaaaagacaggcaatactaggtaaatggattaggaaagaaaataattctagagagtgatcacatattagagaagccattataaaatgtacataaaataaaaaagaaatataaccaaataagaaaatatgtgcatcaaaaacgacagaaaagaacaattccttaataacctcagaacacatacctatatttttagaaattacccttaggattccaataactaagtgatcatgtctcaaacaaacaaaatttacacaagagaaaatacaaataggaaacaaatgtctgggaaaatgttccaactaacatgtaatcaagaaatgcaaatttaagcaactttttaacatctgctaagtttaaaaaaaaagtttgaaaaaataaaaaccagacttacaggaagaatgacaacataaacgtagtctctgctcccctccaggaaaacggctgaaattaccaaagtggagggagatggggtgggggtaggacatcagccgtgaaccaggaatggtgccaaccacatgtcaagcacaaagtgaggaatttctaccagtttcaataccaactgtaaaaaagaataacaacctttcctcaatggcagttgcaagaaaggagagaaggaaactatggtgaaattcatcagcaggtcacaagcagatgacagacggccatatgtggagtccttctccctatgcttggagacaatccacagctctggtgtcaaagagaagagaaagcaacgagccactcctagccatttttcacatatgtggcaacttactagtggaggtagtcagttgaatatgggctggtgtggggtgtggggtgtggggtggaatttctgtaaggtctaggcatcctgttggagagatgaggattgatcaaatataaataacagaaggaaaggcaggtgtttgggagaatacacttctagccacatcattcaggaaacccataggccaaagactttttctcataaatgaattacttctagcagtgtttctttgccctaagcctgaggctcaatacaggtctggaaagaccttccccaagtgactggatacacctccagctcagtgaggccaccccttctgcagaagtttcaacagagaaaaattatgccaagtacccaggttttcaatgcccatggctcaagaagcatttctatcattttttaggtttgaatgaagacatatttgctcatatgatgttgcctcatccatccctccacttactttctatggggaggagcccagtggtacccaaataactagagaagaaagattacctatttgcattatttaggaacaaatagcaagcctgaatagaacttctcacagagataaataaggagaaaacaccagtatggatctaaaaagacatcacagagtaaggggggactatttaagcatgcagcatctagaatcagaatcccagctctaccatttactagccatgcaactttaggcaagataattaacctttctatgcctcatttataaaataagggtcatcatcacaaagattaaatcagtatgtaaaatactttcccaaatatccacatggtaaatgttaggtattgctatcattgtccctattttattatgtctaagcaaaaaaaatgcaattaataaagacaataaactttggatacatcattaatgctttttttaatcaaatatttctggctagtcttccagacagatgtactttctgtctcctttaagttaggcaggatggtgtaacttgttttgatcattaaaatgggaattaaagtcatagtttaacttctgggagctaaatcacctgagttcaggagttcaagaccagcctgaccaacatggtgaaactccatctctactaaaaatacaaaaattagaattagcccagcatggtggcacacacctgtggttccagctactcaggaggctgaggcaggagaattgcttgaacccaggaggcggaggttgtagtgagccaagatcgcaccattgcactccagcctgggcaataagagtgaagcttcgtctccaaaacaaacaaacaaacaaacaaaaagttggtgtgtgaattcatcaagtgatttctttctcaatcatagcaaccttctacatggtggcagccccatcagcttgtatgctgaagtgaagataacttgaagcagagccccaatcaatagctaaagcatgagtgaggaaaaaaagctttattatactaagccactaagaagtcaaggttatttattactgcagcacactgtagcctatactgactgatacagaagtaaaaggtaaaaaagaaaatgttttcaaaaacttacttccagaaaacagtagagtgttttggacaataattgctgtatagacctagagacagtaatgataaaataggcagatgaagcaacagctgaaacatgacaagtcgagatatccaaatgagattaacggtgaggcagcaaagtcaaagaaaaaacgattgggaaataattgtggcaaaagcttgggcaaaactaaaggatcatgtatcatcatgttgaagttaggccctacctcacagtttagaaagaatcacagagcttttatagcccaaggattgctacaaaaatgttcattgaagtgtttcttagagtaattaaaaaaaaaactgaaggaaatctaacaactaagagtagagaatttgttcaataaacctgtgcaaatctttgtacctttataacatcactgtccaatagatctttccacactaatggaaatgttctatgtctgtgttgtattatgcaatacagtagccactaatcacatgtggttattgaacatttgaaatgtggctggcatgactgaagaaactgaatttttaaggtatttgatttaattttaatttaatttaaatagccacattggctggtagcttccaaattggacaatccatattttttttcttcaatttttgttttaagttctggggatacatgtgcaggatgcacaggtttgttacataggtaaacatgtgccatggtggtttgctgcataggtcaacccacgacgtaagtattaagtccagcaaccattagctattcttcctgatgctctccctctcccacatccttctgacaggccccactgtgttttgttatccccaaagtgtccatgtgttctcatcattctgctcccacttataagtgaaaacatgcggtgtttggttttctgttcctgtgttggtttgcagaggataacagaacagcccatatttgaaacgatggcatagatctgtatttgttagcaataaaaatgttcataatttattgataagatattttagagagcagttaaaattaacttatttgtgtgtgtgcatgagtgtatttgtgcaaatacatactaactgaggactccacaccaaaatgtcatcattgggtactggataatggcagtatggatgatttttctttcttctttaaatctttttggactgtctatggttttcaaataagattgcagtactcttatatacagaaaagtaaaactgtttttctttctttttttctttttgagacagagcatccctctatcgcccagactggagtggaagggtatgatcatagctcactgcagcctcaaactcctgggttcaagtcatcctcctgcctcagcctcccaaatagctgggactactacaggcacatgacaccatgtctggctaatttttttttactttttattttttgtcttcctatgtagcccaggctggtctcaaactcctgagctcaagtgatcctctcatcttggcctcccaaagcattgggattacaggcataagaaactgagcccaccccccattttcatttaaaaaaataaaattattgaaagctaatgcttgtaatgctgcaggaaaactgttgatgttattacaaattgatataattattttgaaaaatgttaaatagatttccacctcaaaaatgtattttaagataactctcaaaagaaggaagaaagatttactcaaaaatcctgtccctagggaataattatttcaattattttgcaacagattaattacaactctcttaaaatgtgtctgcagattataacagaaagtgaaaagggaatcatgttaaaagctgatttaagacagtggaaagttatctgtttttattttcctttaatattttaatactactctcaataaatctcaataaatctctgtacaagggccagtacatcagaagaataagcagcgctaaccactaaaacgtaattccctggttctcagtgactcaacacagttgaggtttagcagttgtttacatcatattctgatgcagtgaagccgatgccctggacagccatcttctgaatggtaactgttttcatcccttggcctccacagtcatcatgaaagagaggagagagcatggaagattgtgcagggagtttgatgaccaggtctcaaagtggcttccatcacatctgtttacattccatagaccggcatctagtcacatagcccagactaaactgcaaggaatgttgcaaaacataatccttctctatgcccaagaagaagaatggtgtctgggagcattctagccagtctctgcaaaacttacatcaaaccaaattcatttgctttcttaataagtttattaagcaggttgatggatgctgctattggagggcccaatattatattttggaattaaaaaaaatacaaatggccaacaggtatgtgaaagtatgttcaacatcactaatcaccaggggaacccaaatcaaaccactatgagatattatctcatacttgttaggatggccactatataaaaataaaagataacaagtactgtcaaggatgtggggaaattggaacccttgcacactgttggtgggaatgtaaaatggggcagccattatggaacacagtatggaatttcttcaaaaaattaaaaatagaacaatcatacgatccagcaattctacttctgcatatttgtctaaaggaattgaaatcaggatctcaaagagatatctgcactcccatgtccatggcaacattactcacaatagccaagatgtggaaacaacgtaattgtttatcaaacagattaacagataaagaaaatgtgacatgatatccatacatattattcagccttagaaaaaggcaatcctgtcatttgtgcaatacagatgaaacttatgggcattatgttaagtgaaaaaggctagtcatgaaacaacaaatactatgtgattccacttacatgaagtacctaaaatagtaagacttatagaaggacaaaatagaatagtggtttccagggtcttcaagaagagggaaatggggaattgctcaacaggtataaagtttcagttacgtaaggtgaataagttctaaagatctgctgtataacattgtgcttatagttgacaatattgtactgtatacttcaaaattgttgtgttcttaccacaataaaatttttaaaaatcccttcatatcactcttattcagcatcatactgcaagtcctagctagtgcaatgagacactaaaaaccacagataatcaaaagcataacacaataatgacataagcttataccactcagaatcaaccattcttaacattttgtcgtataacatttttgctataatatcatattgcattgtatatatcactctgcacattgcttttgtcatcaatgtgttttaagagccagtgttcctacttagcattccagttcatttcttttacttacagcaatatagttcattttataagtatactatatgtatctatttacctgttactttatatcgtggttattcccatttttctctataaccattctgcaaggaacatccttcagcatgtctttttatgcagatgtgaaatgacacatgcctagaagggaaattgcaagatcaaaaacactcatttttttgaacattataaacatgtataacttgtagacatgaatgaaaatataaaacacatgtatatcaaatttgtagatgacacaaactcagaagggagagatgttatgataaatgacaaaaatcagtgttcaaacttttcataagtgagaatactgggccataactaagaagatggaatttaagaaagataaagataaaatcttgcatttagttgaaagaattaaatgcccattgcaaaaaggccgcgttattacttgacagcaatttatttgaaaaatgtctgggatgttagttggcctcttctttgctgtgagctaacagtgtgacactatttagacccaaaaaaatgtagaaagacagtcccagatttatgatagttccacttaactatttttcaactttatgatggtgcaaaagcaagacacattcaggggaaaccatactttgagtacccatagaatcacggtttttcctttccagtcaaatattcaataagttacataagatatccaacacgttattaaaaataggctttgtgttagatgattttgcccagctgtatgctaatttaagtgttctgagaatgttaagttaggctaggctaagccaagatgtttggtaggttaggcgtattaaatacattttctgcttacaacactttcaacttacaatgggtttatcaggacataacccctccataagttgagaagcatcgtatttatacagctatattcatagaagaaagttttggagggtctcaacgttaaccttaattttattctaccaagtcataactctatagtgttcaaataaaaccaacttatattaacataaggaaaaagagaaagcagtcgtttcacatactacactgcagagaggatgggtttggagtaaggctagaagtaaaaccagagctccaaacgctgctgcaactcatcccttttactgcctcccatcaatgtatctctctgcctactgtatgtattctctgagctaccaaccacatgaagctggctatggcctaaagaagatctagatcggggggtccaatcttttggcttctctaggccacactggaagaagaattgttttgggccacacataaaatacactaacactaatgatagctgatgagctaaaaataaagaaaaaaatcacaaaaatatctcataatattttaagaaagtttacaaatttgtgttaggccacattcaaagctgtcctggtctgtgggttggacaagcttgacctagatgatcctcatctgcagcttcaattcatgaactcccaggaggggtctctgcttggcccagcacaggtcttttgtcaactcctttgacaaatcaggatggcagccaacttcagaatcaatggttggaacaggagaggtacaacctatagatagccttaggaagattgtagttgaccaggaagcccaatttgtatcttccaaagttattgtccttcatcttggagtcactgggtatgtagttatctgcagacatgcttaaacacttaacttcctttgcttagaaacctctcctgattctgttactcttaggctgtgtggtcaacatcacataaacagtgagccctcgatatttaacagacaaataaacccaaatacatattttattcactatgtgatttttttttcctcctgggttttatatttttaagattcataaaaataaaatagttacttatgtatcatggcaggtatcaagaaatgtactcccatcagctgaatggggcccttgtaataattgcagcagatataatcagtatgcctgcctaaactgtgagtctggatcattaccaaacttgatagttactgagctctgactgtgtgcaacactataggtgtggatctacactagaggatttaaaacctcacagagccaaccaaactgcaaacaactggggaagatggatcacatgcagaggaaagacttaatcagctgaagtttctgagtagtagtccctgattatcatcacatcttaagagggggccgcaatagaatccagacaagaaaaggatattcagaataagtgagatttccaataagacataaaggagaaaaagcaatttggctaaaaagagaaagagacctaggatacagattcccatttggagtattttgctgcacactttatatcaggggtctaaacccagactcagaggcagaatcgtatggaaaaccgacaagatcaggatcttgggtcctaacttgaaaaattcttatccaattcatctgagtggagttttgtgatttatacttttaataataattgtagctgataatctatagcacttactacatggcagacccttcatttaagtgttttatatgtaatattaactctctaagtcctcattttagccaatgtattaggaactgttattatcatccttaatgatgtgaaaactgaaacccagagaagcaaagtaacttgactaaggccatgcagtgttgggatttgaacccatgtagttgggcttcagaatctgctaatcactttgttctgcagattctcaaaaaataaaataaaataatgactatgaaacttgcaggcaattgtgatgaattcagtgttgaaaccactgcattctaacacattcaaaaattattatgtactgagcactgcttcaggatagaggctctattattcaaagcctggcatatagtagatacagaatattgttggatatattccaaacagaaggagtccttagaagcaagattttgtatagggaaatctgttgggcctgcctgctaccgcagaaaggaagtggggcaaactgagtgactcatatcatgttttctgtccccattataagaaagtgccaagaatcagaataagagacgcatcattctgaccctacctttaaagctctgcccagccccttaaatctgtgccgcttatgcccacacactaccttaattatttggagaaacaagactttcaacttttctctttcagctcatccttttcttcagttccatccttttttttttttaaagtggtgtgatcatggcttactgcaatctcagcctcctgagttcaagtgattctcctgcctcagcctcccaagtagctgggattacaggcacatgccaccacacccagttaattttatatttttagtagagatggggtttcaccatgttgatcagactggtctccaactcctgacctcaggtgatccacccacctcggcctcccaaagtgctgtgattacaggtgtgagccactgcacccggccagttccatcctttttagaaacaccatggaatattaagaggatgtgaaactccaagcagttgatttctctgcttatttaaagtgaagataaatggcttgtacatgataaatatttttggatggatggatgggagaattaaacaaagagaattaaacaaagaattaaacattgaatagaaacccagtggtagatcactgtccatgtctcctatgggtctgtcaggactggctgtcttactggtaacatgcaatacggtgttataattaagtgcactgtctttggattaggtggcttaggctcagtcctccttctaccacttactagctgtgtgatcttgggcaagtgacttgtcctctctaaacttcagtgtattgtctttaaaactagaaataataatagcacttaaactaggggtaataacagcatcaacccacaaaggtgttgtgaaataatgtacctgctaagtacaatgttcaatgcataaaaatgcccaattaatagcaattatttcacaggaaataatatcaggtttggtggcttgaaacttgccttccaatatcttttggggtaaaacttgacaggcatttttttcttccaaaaggcaagactttggggaacatgagaggcaaatggcagattttatttagactggcaaggaagaaagaaagggagagagggaggaaatataaaaagataacctttcctcttctgaaaatcacacatcaatttttttttatacaaaatagggtccttctctatcatccaggctggagtgcagtggcatgatcatagctcactataacgtcaagctcctgggctcaagtgatcctcctgccttggcctcccaaagtgctggaattacaggtgtgagtcatcacactgggtcataacatttctttatattcatgtgactccaaaggtttagctaccagtgatgaagttatcccaattacaattcttagacaggaaaggaaatgcagtcaacttctgagaaaatgggttgactctctagaaagtctggagggtgtaaatggcccatgttctgaagagggaacatttcaagcttatgagctaggctcacctcaaccaaagagctcagctaatacaatatatccttagagcttagtttgtttctggacatttggattatttatttatttaagtatttattttagtgcatcagaatcaatgtagtacatcagaatcaatgtagtacatcagaatcaaagaattgaactaaaatgaaaatcaaagaattttagtgcatcagaattagtatagcactttgaagttagacaaaccttaatttgaatcccagctctaacatttaatagttgcatgaccttgggcaaattgttgacagctgtacacttcagtgtgtttgcgtgtaaaggggaggtgatactgttaccttttacatccacatgttgggatgattaaacaaggtcatatgtataaagcactctattcaagacctgacatacagtaagcactctataaatattggctatacttatgtctcattgatattattattttcataatgtttcttgtctacttccttaatgaagtgcgtaatactcttcttgggcattaacacaggctccacctggcctgtaagtgaaacagggagagccctaggcttttgctttgttttgcacagagcctgcacagagcccacccaagtaaacaaaatctcctcttctttctctccattttaatttttcttttattccatgccctatgaatagattagtttctttctctctctttgccgaaataccttcaggcctcctctcctcccttcaggcaaaagtccttaaaacctccactttcccccagtaatatttttctccaactaactggaagtggagaaagattttcctctttgtctagcactgatttttgacttgtaattccatttcaacaaaaccacttgcactaaagcttacacacaatgtaaataattcattagaaatatatatttgcttgatgcttatatacttgcagtgcatctgcagagtctattgtatcagtcaaggaaataacaggactcccagtcaccaaggtgaatggaaaattttcctctttaaataggtaaaaatttaagttgcatgcaaattaatcttggaaatacagaatgctaacatagcaggggactttaaaatgtgtatattctaacactctctataaatgtggaaaataagtcccagagcatggtaacatggccataacaggccttgtagcattctggaatttaaaaggctaggtgcatagaagggaaaatagatacgaatggcaaaggcaggtacataatgcctaaaaccaggatgtggtgtagcagttaccatcgtcatcatcatcatcatcacaatgacaatcaatggtaatggctacaatttgggaattatgatcttggcactaagcagaggtctttacatttatctagaaagatgaccatgggtaacactgcataagactgactgatttagactttgagaattttgccagttttgggtggctgtgagatatcttgtctgaccatagggctagatcatacagctacaagagaaggtgggatttcttcagaagggaatggacattgccactgtagttcatcccaggcatttttcaacctggaaagggaatagctacactccagttagaggtcctaggccaaggcaaaggagaatctcctgccccactctggcaccgagaaccagtttggtttctactccaaggatgggtgatatctgaattcctccctgtgtggtgggaacctaccatgggctccataagagcaggctaggaataaggttcattgaaggatgccaaataaaaaatcttgtggcatgtataagttgtcctctgtggtgtttttcagttccatgccccaggacttcaagacaccgatctgcaattgtgccagaggatgttagagaggcaactatgcccttgcttgggagaaaaccacatgagcagaccatgtcttttcacccaaggccagaggagaggaagcagaagacacatttcccggtgcctgattattccttcctccagggcttacggttgtcattttgggccatctcacatagaagaggtacccaaatgtttgtcatctctccctgaaagcgtgtctagtcctcaaatagaggaaagccatcactatctctctgccttctccatcgagaccaaaaaggaagatacaagctgggaactagatttgaatatttcttgatactggagaggggcagggtgatgtgatctctggtgagtttcctcctcaagcaggggtgcgggtagcctgggtttcctgggcccagatttcaaacctgtgtcagctgtagctgcacacagagtgcccagagctgttgggtgcagcttaggtatggcagtatcagtcatctccacacctgctgcagaaagtctcaggacagcactgtgagtggggctggggaatccggagaagaaagttctataagcacaacacggtttactttacagacagcttgctaccacataacgatttgggtacaacccatgaaaggagccccgcgggagtagaagagggtatctccatgtctctctaggagacgaacaagcaatatccactggaatccagaggctaaaaattgtgatgtcccaggcctaagctagacagagcagagaatgggcaggacttgcccctaaagtatgggcagttaaacaagaggaggaaagaagaaaaaaagaaaagaaaggaaacactaggcccaaattgatttaccggtgaattctaccaaatatttaaagaagaatttaaaccaactctacattgcttaccaactctttctatgaggccagcattattctgataaagccagacaaagacatttcaaaaaaaaaaaaaaaactataggcccatattccccttgaaaatagatccaaaaattcttaaaatatttagcaacaaaatgttatggtccaacagggctttgatccgaagaagtccaggagaaagagacaattcaggaaaagaggcagcaaaaggaaatgtgggaaacttggcccaaagaaggtttgaagcagacgatggatggcattgcctggaaaaattgcctgagtgtctgatcctaggggccagtgtttccctaaaggattcctacagttgagttcattaagattcttaggttgggatacctagaagaaaaaactgagacaaggattccagtgtgcatgatttacagagggattgctgtccagaaaaaacagctaagggagtgaggaaagaataaggaagagggagaaacatggcaaggatgtggacccagataaagtcagcccttgacctgacccacagggtgctctggagtataaattgcatgacacaattatcacacctggagcatcacctgcaccctgcgtcagtcagttattgtatgcctctggggagtaggagatgtcagctcccagtatcgctgagtgaggccgatcccgtcagcctagggtaatgctctgcagaagtctgcaggtggatgctgttggctgtggcactcactgcaccatcatagcagttgtaaaggggcttggagtgtggcaccaataacatctactgcggaggacttcatacagccactctcctccccctggacagttggagcctgaaataggcaatgatagcggaggtagttagatgaggtactcatgaactatttagatggtagaattgggaggacacgcagctaattccatatgggaggcagtgaggagggacagtgtttagctgatggacataagaagtataagattatactcatgccctggggaactggaggaatggtggggccattgtcaaaggtaaggaacatgaggaaaggagcaggacttggaaaggaacataaattcagtctccagcattttcattttgaaaagggaatcaatggcttatgaatagcatacctggagctccataggggtttcagggaccaattatattaggaagatgaggccagagagaggggaaaaaagaaaaccaaatagtctagtgctggccctcatcccatcctacactggagcacttctgctatcttggtttgattcccacaaatgcagactttgaggcaaggattaagacacattgaaagacgatctcacgggttaggtgtggtgactcatgcctgtaatcccagcactttgggaggccaaggcaggtggatcacttgaggtcaggagtttgagaccagcctggccaacatggtgaaaccccatctccactaaaaatacaaaaattaggtgggtgttgtggctggtacctgtaatcctggctacttgggaggctgaggcagaagaatcacttgagatccaggcttcagtgagtctatattgtgccactgcactccagcctgtgcaatagagcaagactctgtttaaaaaaaaaaaaaaaaaaagatgacctcaggaagcataggtgaggatagtgaaaatgaaagaaacagccaccaagggaatactcatgaatagattatctctgaagaccacaggggcatgatctgttggaaaccctctgaccatccatgtatcccacatgtttcccactgagggataagaagctattttgctaccgtgaatggaacctctttggttgagggtgtaagaaacccctcaatgccatgctagcttgaagaccagctgagagcctgtgtagaggctgcagaagaaaactagtgtgtagagaagcactcacacctcagcgggccacataacctggggcaagggatccatggcttctgctgcacctgctccactctgtttttccatatagcaatttctgaatttccatataagatatgttttttgctttgtttttcttttttaagagaaaaatctcctgtctagaaaaacaggttggtcagtgtcctaaaatcaaaagtccgcagcagaaggcactttgaacaagcagttattgcctcctctggtctcacctccaattctccatgtaaaattaatagtgtactctggggacatcccttccattatctagtcttggtgaaaagggacaatggtagaagcagggtaatctctgccatatcgattttctgtgtgagcttctttgtgcctccagggagacaccactgctttcagtgcctattagcagttgtgtcttttaacctcccggtcaggctggcagtgtgagtccaacaaaggctccggctccaattacttcgccagtacatagcctggctgaactggagcttgcggctccacatgctggaaattgcactttccaccaatacagagacaagcaaagaggggcattcaacaaatccccagctacagctcagcatggcagggaggcagaaaggacctatataccaattagccaggcagctatggccatcaatcatgggtgacctgggcacccagcatgtatgtccatcctggaccccaccaccgaaatcacactgaaaacttgtatccagaggaggcttgagacagccaaagctacaggtggcaaaagctttcattccagaaagcacttcaatcccacaacctggagaggaaggcccatacgaccagcataaaattaaaagtgtgcagtacttacaggacataattctatgcttacatgcatttctcagaaaattttggcaaagactgctaccttctgagcaaaactggacatagaaatgacaataacacatattgggtatttatcaccttcttaagagatgcatagccattttcctgtggctgagacagaggtctcttttaatacttaacatttcctttaggttggcctaatgcccaaagggaagctgtaataatctcccacatgtgagtttggtaaaaaatttcacaatgacaatttaattcactacttactgcagtccttattatggtctttgtacaacaggtaatatccctgttaatttgagaatcactgttaacctgaacctttcccattgttttcaaagctttctcttaagtgtcagaaacacacccaaatacacccaaacacacccaaacttgtattttagcccttctattgtgaatattcattaagggtggtgtgacatagtgcttcagagcacagctctggagccagcctgcctgagtttgattcctgctctgtcacttattgacctgcaacatcaagcagtttacttaacctctctgaggctcagttttaccatctgttagatgaagacaatagtgtctactgaatagggttgtcccaagagcacttagaaccatgcttagcacaaatgctgaggctacataatgctcagctcttcacttcctgcttctctggtcatgggtgttattataaaagtgcccttccaggagtttgagaccagcctggacaacgtagcaagaccccatctctaaaaaaaaaaaaaaaatgtattagcccagtgtggtggtgtgtgcttgcagtcctggctgcttaggaggctgaggcagggagattgtttgagcccaggaatgtgaagctgcaatgagctaagatcattccaatgcactccaccctggacaacagagcaagaccctgtctcttaaattttgttttaaagtgccctcgaattttgttaagacctcagaagctgctccatgagtgggtggtgcaatgttattggagcatgggggtcagtgaggagagctaagatttctgggaggccaacagaagggttagaatgtgcttcaaaatttagttgggcatggtggtgtgcacctgtagcttcagctacttaggaggctgcagtgggaggatcactttaatcgggtatggtggtgcactcctgtagtttcagctacttgggacgctgaggtaggatcaagggaggatcacttgagcctgggagcttgaagctacagtgagctatgaacatgccactgcactccagtctgggtgaaacactgagaccccgactctaaaaaatataagttcataacagtacataatagaggaggctcaaaacacatgccagtgatgaaaatgaaccctcgcttctgaagagagcactgcagtgtcaacaggtggctgcaaaggtggtgagcatgaccctggaccagggaggttaggcagggtcccagcccagctaagacttctttttggaaaccaacatggggtctgacaagctgtctcagtaatgaggctctgcacttttttcattctccccttgccagatggaggcacccccgtttagccatgctgctcccaggccctgctctctgagaaggacttggtcaaacactgcatctctggatcctgagaagtcagaccagttatttcagtgcctggacccttcctcttttctgacccagtatttccaaaagcaagtccattgttcagccttgaaaacagctgattgtgagagggagcttatcacagcccagcagactaagaaaacattttagagaaagaacatttggaaggttcattaaaatgctgaaaaaaagagcccccattttggggtaccttcagggctttctaacctttttggcaagtgagttgtttttttgtaaataataccttacatagggcccaaggtataaaatcaagtgcagggctgctctgttgaaggggggtctatagatgcttccacctccaaggagcaggctttggaggaaacagttctagtgcatgtagggacaaacagaggaagcagagactaccttcccaggggccctctcttggatgcgtgccctgcatttctgcagcctctctttcccttttctgatgctttcctctcattccatctgaaaagtcactacaagtgctagaagctaggccagaggataaagaccttgaagaaaactgagcctgacacctaatatgggattgaggaatagaatggaaagggggaaaatacagtggggaggtgaaaataacatccttagctgagaaatgacaggatgaacatgtcaaggcagtctcaacattttaaacgttttccaagaagagagtaagcagtggctcttgctaaaggaagtaaacgctgtcacggccaagctctctgcacaggtggtacacctaggaaggctggtgcttgaaatgctcctccctgaatgtaccagatagcccctggttacggaagattgtgcctccatgcacccttctcaaactggctaccccatcctaataggctacaagattcctggcagggactgcagattctacactggtttggagtcctgctactttagccggccaggtaaggagatgtttcactctcctgcccttatcatgaagaagcatgagaccaaggaaaatctgcatatatgaaaactgaggaatccagaaaagataccacaggattctttctgcatggggtaaaaaacctctctgtcatttacagaaagtctcccctaagagaagagataaaggtcattatcaggactggatttgaaaaactctgatgtcaggttatactcaaactacttaaagcagaatctctgggggcagtatctaggtaccagtgccagtgcactatcaagctgcagagtcactgctttagaagttgttacggagggagggagggaagggagggagggagagagagagaaagaaagagagagagtccaaaacttggaaagaagaaagaggactgcatgtcttctttagtgtcatactgtcacatcgttttccaggcccacccaaagattactgaactacctagaggaatatacctctgtttgaccttttcctttctattgattagaactcagatactgttcaaagttaacctgtacatttgtagccagtacacatgcaaatgatttctgtccagtaataaagaaagcccctaaggttgcagttatatcaccctataggatattatgcagctttgtatcttatctagaagtctatctctaatttggcaatgttcatctaacattcttcttttattgtctgtcaatacgtagttcctttatttttctttgaattagctttaccatattttggttcactcattgataaactgaatacattttgacatgaattcattttgacatgaattcattatattttgcataaaagttttttttaactttttgaaaattttactttgaaagtaggcaaccacttttatattctccatcaatgagcttaacttgctccaatgccagcactctgtaaaaaacttatccaaccagctccactgatgctggaaattcacatattggtaactcattgctgagttaactctgccatgtcgtcataccttagatgagtggtgaaccagatcatccagccagtcactcatctctgactctgtgggaatagaaccatgaaggagtacattttgaagaaatagcatgagttgagtaaagcactagcatgtatgtaggatggtgaggagaataatctaggaagggtgagagcaaatatgacagcctctgaggatggagggggagaagcagaatgcccaactcaaaatgaggtgatagacacaaagaaaattaactgccttcttcaaaattttgaactggggtaagcctgctcctgttacataaagatgaatgaatgagggagtaagagaggtttaatcagttacaggctggatcaaataggctctattggtctcatctttcaagcatgccttacctattggagcagcattacaggtagcttcaggagtgactgccacccagtgtgtgtgccaccacgttcagggtccaaagctggacctaatgatcattgaccatgtcttttccattgactatgaccttgacaaagtcatatgcaggctggttcaaaggaatcactgcatctatttgaaaattcactggcttccctgatcatcgtcctacttaatgaccatatgttataatttactgtggaaagtcaccctacttccttctttgctatagtcgggaaaccatatttcctgttacattagcttctaagagactcgagtgagcaagcaaattacagatctgaagacagggatgcatcccattcccatccctgacatgggtcacacaccaggctaaagtcagcatttttcagatagttcatcagcaatactaggagacctttccagcaaggttactatatcactaaagcaatcatgtgtgtgagtgcccccagccagattgagctaattcaatgtgaagtaatcagagataagaaaaagccactggagttataaaagtatacacatcaggtactttacccaagaggaaggggaagtttactgggaggtgaagggagtgcttcaaaatgataagaaaagtgaactagagaataaaatgaagattttattagaagttaagacagataatagaacaactttttttctactataaaaggaataagaggccaactaaggactcatcagggttttgccaagataggaagagtggtcgtttgccagaggagttggacattacagaaaaaatggaggaatgtgttttttcagtgctcaccagggaggaaaatgcactgtgtgccaatgcagaagtaccttccttaaagaagaaaatgcaatcatgaaaaccactggggcaaaaacatctccaggaggaagaagccttggaagtccatttggaaatactcaagccaggaatttccagtgctcctgaaaagaagagaagcaacttcgagcacatgaggcaaggagaacgacttccatctctttagagtcccaattcttagaggtcagggaataggcactgtccctgagaacaaaccttctcataataatggtagggcctcactggcagagctgaatgtcaatgctgggtgtaagttttctctcactgccaagtttcatcatttctctccctattacttgctccttatgggagtagagttgggttgaacatttggtcttagaccaaggggaactagtcagaaagctgggaataaaagcttttgccaaaagcccgtgttctcaacttccacacccagcttggcaccaagcagaaatttcctgtttagtccggccctattaggccccagtactctatttcagtgattggtgctgagaaaactcattagccattgggaaaatatcatattatatctctacctcacaccatatagaaaaatattacaagtagatttttaaccataaaaatattggaagaaaatatgatcaaacattggagacaattcttctacctatggactaagtctcagcaaaaatgatgcaaaaagtgatgctgtagatgctgtatatgcctggttcaggcacctaggttcttttttttctcttggaagcgtgatgtgccagtttccacagttactgccacaaaaccctctctggagatctgtcctttggcaacttatgcctcctgagctggaagtctctgtcagctcttctccctagcctcgtgaagctgaggctagacttaatccaaacccacatccttgcttcttcctctctttcatcctaattctctcactttactcacagttttcttaaaactgaatcctaattcccttatttcacatacagttttcaagaaaaactaataaatctcttggagggcagatcatctgagcccaggagtttgagaccagcctgggcaacatggcaaaacctcatgtctacaaaaaaaaatacagaaaattagccaagcatggtgatgcgcacctgtagtctcagctacttgggaggctgagatgggaaaatcacctgaacctggaaagtcaaggctgcagtgagccatgagtgtgccactgcactccagcctggataacagagtgagtccttgtctcaaaacaaaacaaaacaagcaaacaaacagacatctctgcttcagtgtctgtgtctaggaaactcaactcttgatacctgacttaactaaataaaaatgtaaataattattatgcagaaatataaatacatttaaaaagttatgtctctatgtatgcatacatatgtgtataaatctatttcgatgtcgtgggctgaattatgttccccaaaattcatatgttgaagtcctagtcccagtacctggttatgtgactatatttggagataaggcctttaaaaaggtaattaaattcaaataatgtcctttgtgtagaccctaatcctatttgagtggttgctatccttataagaaggggaaattagacacagagagagatattaaggcaccagttcacagagggaaaagcaatggtcacagtgagaaggggacaatttatatgccaacaagagagactccaggagaaaccaaacttgctgacgcactgatcttggacttctagcctccagaaccgtaagaagataaacttctgagtttaaaacactcagactggtcgcagtggctcacgcctataatcccagcactttgggaagccgaatgggtggatcacttgaggtcacaagttccagaccagcctgaacaacatggtgaaaccccgtctctactaaaaacacaaaaattagctaagcatggtggtaggcacctctaatgccagctactgtggaggtgggagaatcgcttgaacccaggaggcgaaggttgcagtaagccgagatggtgccactgcagtccagcctgggcagcagaatgagactccatcttaaaaaaataaaaaataaaatgcccattctatggaactttctttttttttttttttttttttttttttttttttttttgagacggagtctcgctctgtcgcccaggctggagtgcagtggcgggatctcggctcactgcaagctccgcctcccgggttcacgccattctcctgcctcagcctcccaagtagctgggactacaggcgcccgccactacgcccggctaatttttttgtatttttagtagagacggggtttcaccgttttagccgggatggtctcgatctcttgacctcgtgatccgcccgcctcggcctcccaaagtgctgggattacaggcgtgagccaccgcgcccggcctatggaactttcttatggcagcctgagcaaactaatacaattcatatagagatatatagtatcattatctctctctctgcctctttcacacacacacacacacacacacatacaacatacacacacacacacagacacatgtgacatttcaaaacatcaaaatatacaaagagcacccataaatctcaaaaaataaaatagaaaaaatgaacaagtgactcaactagacgattcaaagaagaataaatcaaatgccaataaatacctgagaagatgttcagtttcatcgtgttctccttttaggtggcacctgctctaccggccaagccctatctccctatcactcctttgcatgttattgtccagtccagctctcctgcattagcaagcccacagcaagtgcctggacagttctgtgcacatggtaggcactaaataactattgatgacaatgtaatagtgctccgaggtacacagaaaaccatttttaaggtaattcaagaagctatcataatggttttgaaaaatcataaaagaggaagaacaactagctccagtaagagagaaaactgttcatcacaagtaatgaaagaaatgcaaatcaaaaggcaatggggttactttttgcaagtttgcataatatatataaccaaaagctagaaagctttgctacttcgggtgcaataaaacatatttttggtttgctgatggcattgtcagttggcaaatacaatttggcaatgcactcctggccatgaactttaaggaaaaagtcaaaatatgaaaaacaccatgtgaaagacaatgtctacaatcatgctgcttatgataacaaaaaattagaaatacccccaaatgtccaataataaaggaatcatcacagaaatttcaggacattcactcaagggagtaataagcagacaccaaaaatggcaactacaaagaccaaataccaatataaaaattaacataaacgcacaacttaggatataaatttacatatggacgatcattatagctatgcaaacacatgcaagtaaagaaagacaaggatgaatacaggaaaacttgtgttgttaggactttttttctttttctctctatttcaaactttctcaatctttgcactgtgcatttcttgaaaagctaaagtcttattcaggaaaacaagacattcatatgtacctggataaatgaagtaaaaacaatgctggccatttttaaaaagtaaattgtaatgtcagaatcccaaaataaagacttagatattaataatagccactgacacttcctgaaatcttactaagtgctaataatgtgctcgatgcattttatgaactgtctcacttagtcttccaataagccaatgagggagatatgattatctttcctgacttaacttttgagaagatgagtcctagagaagagaagtaacccatccaagagcacataagctctgcagttagtaaacagctgtcacaaggtggctagctgcccccaaaagcatgcatgcttcctgttctacactgcagaattgttgctgagaaagagctgctgagccagggacatttcccagggctgctcactccctcccccaacccatcctttcttttgcatccagatggagccaccttcctagaaggcagacagcacatcttgtagcctgtccttagcagggcacatgctgctctagggaggagaatcaggtctataaatcagtcagaagtctgaaactaatatcagcaacagaaataattaccctttttaaaaaaagattgtattaaaccatggcaatactattcttcaccaattcaactgccagcattgaaaatatgttacttccgagaatagaagagagtgccaggaaatgggtaatttcctaacttgctggtggagagtaagttgatgattctaactttctttgggacaatttattaatatgaatcaagacttcaagaactttagaattctgtaagacttttgacccaggagttattttggaaatgatcttaatgaaataataagtaatgtgagtaaagatatatagcaattgtattgcttcatctcagaaatttgtatattagagactaggagaaaccatttaaacatctagttacagggaagtagaaaaattatactttggctacacaatgagttactatgcagctattttaaattatgttgcaagagaatatttaataccagggaatgattatgatacattatacagtgtgattccattcttattgcatttgtaaaagcacagctatatcaggcatgaatttgctctttctgtgcaggtgcaagaactatcacatttctttttctaattcgaatgaaatctggcttagaacccccatcctacatggctgaaagagccttattaaaaacagctgggcctccctctccccacaccacaccctgtacacatacacatcttcctgtagatcttctgactatcccaatgcttcttgtggtaccaagaaataaaaatgtgcaggttttcaggccatggttgttgcctctgctgccataatgcctcaaaatatacctggtattgacaagggctgcagttctggaaggaaggtggaaagagaaatgcctttcatagtactggccttgtcacaggcttgactacaggaggcttctgccattgtactcaaagtagtggggttggtgttctgtcctgggagaagcaccatcagaggttttgccactgttggtgtgtggggagggggtgcaggtcttagaagacctgtgatcattttctcttctcaacctcccctggatacttcacctcttttctaggaccactttattttattttattttatttttgagacagagtcttgttctgttgcccaggctggagtgcggtggcacaatcatggctcactgcaacctctgcctcccgggttcaagcaattctccctcctcagcctccagagtggctgggattacaggcatgtgctaccatgcccggctaatttttgtatttttagtagagacagggtttctccatgttggccaggctggtctcaaactcctgacctcaggtgattgcacctcgccttcccaaagtgctgggattacaggcatgagccaccgtgcccggcccactttaccttccatatttaaactccagtttatctctctcctcttcttgtaggacaattctgccttaattctatgactaacctaatcttccaaactaatgttttgcctgattatttctttgatgaccccaagacccaaataaactgttagtctccatcctttaaatccaatccatatacctttgcccacttatactcagaggcacacacaaacccacacacagatgagcttaaaccttagaattcaaaggcatgagtggcttttgaatttttttttcccagaggtatgtgcatgtgttgagagaagaggatagaaaagaaaagggtgaaatgagagaagtagggaaattaattatcattttattctctctcacttaagcagtgaaaacaagtcaacaaacctgccacatatgtgtgcattataaagccttgaagaaagtgtttttctttgtgtgatggggttataggaaaattcttattttcctctttgtattaattattattttccaaattttctacaaaaactatttattctacaatttaaaagaatgcaatttctttccatgttaagatatcaactattttttttctaattcttttaccaccttttgtatttctaaaacaaagaacaactgaaaagcaatgagaagtactttattgaaggacacagaccatgactgtaaaggcattttgaaaaacaaatgagaaagaaagtccaaaaatgtttcttaagtggtagctccactggaatcagtgtgcagctttctaaggtaatgaagtaaatagtaacattgattttggatgtaaatatttgaattgattactttgcttgtcttggttttaatctttttctctccccctaaagaacttccacacatgatgccactatgggggtgtgtacccacactgactaaaagtacttatacttaaagaatgttttgctattcccaatccaatatacaatcccattagaaggtaggttaatagatagccccagttcaaaaaagaactgctattaccctccatttttcctctctctgaatcagagattctcttgacaactatcaacagcccaaccataagatacgaatggagatggtaatcatgccacaaaaaaagcccagcagccccatgggggtgcctggaatggtgagattcccatgttcccttccagggcatttttcaatctagaaacattctatttcagcaatctctcctttcagacccttttccatctgagcacctatccagacattaaaattcgtatcttcctttaagaaatctccgtcacaaagccatcatcacccttggctccagcatagataagtcttacatgtgtgatcagaagtaccctggagggagataggaggtgggggagaaactaaaagggcataaacagaaagtgttcctcaacattttcccccattttcacctgattcagaaacaccttgagttcattaccaaatccagaaattatttaacacagatgtacttaaggagttcttgcctttttgtctgtttctcaagttgcccttcatcaccctgaagtcatgaccaggttttttagcagaaaaagtcaacacctgcagcaggcttggccaaggactgagctcatctcctagtcactggctccaggttcaggtgctgcttcctcccacgcttctgcatgtccttggtttacaaagcagatcctactcacagggagctcagggaagaacagttccttcatattcagctcttccaaagacagtctttggataggcggctgtagccaatatagcacagtattcaaaccatcctctcccaaattcacattgttctgcatcccaccactaatagattgtggtgttcccaagggctatgtttttaattaactcaatatttattgatttctattgtatggcaatcattatacttttttgtctttgtaataccaggtcttggtcataagaagcatataataagtgtttgtttttcaataaatgaatatttcctcacctagaaagtgagctctaagaggtcaggaacttgtgcctgacacctcctgggtgcttaaaaattcttcgttaaaattaattaattagttaactcgtgagtaaataaaataatcaacccataccaaaaaactttgtagctgacagtagcaataagtaatacatctgtacaatgaaaatattttgacttttggaattagacccagatccaaattctaggtttatctatatgtccccatatatagaaggaaatcgtatttatctgattgaatcatgaggatttaatgagttattaaacataaaatgcttggcatatttaatggatataaagtgcctggcttttctaatgagtcaaagatgctagtttctcacctttatctcctgtttctgaatctcagttcgtcatccttaaaatgacaataataatggctacttcatcatgatgttgtgaagattaaattgctgtggaaagttcctgaaacagtgctcagcaaaaatcatctctatttttcttacatttcccctaatttcattatgtagctaatgtgtgaagctggaagaaagaagtggattagccattcttaagagtcttgggacatgtgtttcttaatcttcaagactccctggtcttcaacccttcaacagctccctggaagaagaggttgtaaccaagactggttgtgtcctgaaattgatgcctctctttttctccagtctagaaatccctgagatttaatacaaggattctcagaataaaactacattccccagcccctcttgctgttagctgtggtcatgtgactgagttccagctgacggattatgaacagtagtgatgaatgcacatctaagtcctgcctttataggggaggaatgtgtgtctttctctttcccacttcctgtatctgaaacgcagacacagtggctaatcatcttagacaatgtggacaagggcactgacctctggaaagcagacaacaagataatagtagcttagtccttcctgctgctataaccagggtctcaggaatttgacaggaattggtgcaggaatgtctcagtctattactaagtattagtaatactcaatattattgccactattaccccagactatgtcattcataaacaataaaaatgtatttctcatggttctggaggcagggaagtccaataccaaggtgcaaacaggtccagtatctggtgaaggccctctatttgcttcatgggtgacatcttcatcctgtgtcctcatgtggtgaaagagttaagggaagctcattccagtctcttttataaaagcactaatcctattcatgaggatggagccctcaagacttaatcatttccaaaagtcctgaccacttaatactatcacctggtgtattgggttctaacatataaattttgggggtataccaacattcagatcatagaagtaacctaactccccgaaccatggagaaatcatgtgagcccctgaatgcttatgttcagctatctgagagagaaagaaatgtttctcttgcttaaactacagatacttgagtctttgctgtttcagatgaaactaaatctgatctaatacagaggcattaggagatcttcgaatatccaggcattgttaatgacaaatccttaccttaggcactttttaagcctcccccatagggatcccagccaccaggcaaggctaatctgcttggtcggcactgcctgctcaccctcttactggcccgcctacccagagatttaaagttcccacctaggcaaccaaccagaatccaatctagccttgaaagccccttccagagccaatcttgtcaatgaagctttccctgctgaatgatagctctctgggatctctcccttgtctgagctccatagcagctgactagaccatctgttgtttggttccaaccccattctgttttctagcccatgggttttcatccctatgcccttcctctttatattaacaaattcattaagaataagatccatgttttaggcgtttttatcagatgtttgtatctttatctgattttggaagtcatttctaaccatgaagcatcatactctgtactctagaagtaaagtggactttagagattggtttctacatcttcctaaattgtgatgtcttcaaaggcaaaaaaaaactgtgtcacaatgagctctgtgtccacagtaactgattcatgcatgtacctcagtcaatgcttacagattgatagatagatgaatcttagcaggcccccgtcatctagaataatgtcttgtccttaatgcctacatgcctctataaactaattacttaatgtgggtgttgccaaggaaagaaactgtgaaaggaaaataaattttgggtaccccaaatcactaagctaaagggaaaagtcaagctgggaattgctctagactaacctgcctcccattctattcagtcacccctctgctcactgagacaaatgcatatctgattttctcctttggagaggcaaatcagaaactcaaaggaacacaaccattggtctcttacctacctatgacatcccgcctttgcttcaagttgtcccgcctttcccagaatgaaccaatgttcatcttacatatgttgattgatgtctcatgtctccctaaaatgtataaaaccaagctgtgctctgactgccttgggcacatgtcatcagtacctcttgaggctgtgtcatgggcgtgcatcctcagtcctggcaaaataaactttctaaattaactgagacctgtctcagatatttagggttcatgaagctttttgatctttggatttggaacttacatttcctaaaacactttcgtttgtaggcaatagaggcttgacaaactgatttaggcaaaaagtaattttagtttcatagaacaggaaagtcaaatgagtaccttcaggtaatactggatacggacattcaaaaaaagtcagcagggttctgtttctttctctctccatatcttagacatgtctctccatacttcttttctgtgatagcttccagtagcccaagacttaacatagcaaactcagcagcccaacaaaaaacatgttccctaatatttgtataaaacatgtatcaaggagtattttgattgctttacccagcctggacatgtgtctatcttgaatcactatggccaagaatttggggtactttactagacacatctaggtcacatgttcacctgtgagactagaggagagggccagctgggttagccccatacaggctccagaatagagaaaggttatgttccagaagaagagggacaaaccaacatatgtccatcactgtcctgtagctgatacctccttctagactcagtcagctcaaaggttttgcctgggatccacatgattctagatttcttcttggcctggcgcagttgctcacgcctgtaatcctagcactttggaaggccgaggcagacagattgcctgagggcaggagttcgagaccgccctgggcaacatggtgaaaccccctctctactaaaatacaaaaatttagctgggtgtggtgacaggcacctgtaatcccagctgctcaggaggctgaggcaggagaattgtttgaacccaggaggtggaggttgcagtgagccaagatcacgccactgcacttcagccaggtcaacagagactccatttcaaaataaataaattaattaattaattaagtagatttcttcctaccatcttcttgccactgttctcgtcctgcagtcacttcagtacgttccttcagtgtctccccttggctccaccccttcctgcactgccaaagtgtaattgatagtttagtaggcagaaagagagtgggcatcccaggattggggaagctgatttaccttctgactaattcaaacctagggtctgaggtaactggagcaagtccctggtgatgccacacaagagaattctgcttctaggcattcctttctgacaggaaagaaattcatgctgagcttattaattggctccatcagcctgtcaaaaaagcacttggtagttactctaatcaagtcatttgttttttctagttgagatcagttattctccaaaatcttcagaaggcactggattcctctagccgctgaaaagatgggttccttgaacaatacaagtgtctaaaagtctctgtttgccaaatttgccagcacttggtgaatgcagtttttctcccaataagagaaaagcttctcaagattgtacactgagagtttcaagaataaattctagatataatagagctctagagccacctacccctttccagacccttgcctcctcctaccaagccacaccagagcttctctgaaatctcaacccaagccagaatttgtgtggaagacttcctaaagtactttggcctgcctgagcattcgtgaggtcagtgtcttcttctgcttttctctctagcacttcctaggatatatttaacactcccatgatctcatttattaataatgtggacttacaactttacagtttgcaaataacctttttcaagcattattgtggataactttcccaaaagcaaggagagataaatagaactattgtgctctaagaggagagaaaactgagattcaaagagtattatgtaatagcttaaggttacatggctagtaagtggcagagccaggtctcaaacttatgtcctctcattacaaattccttaactttttgttccgtaacacagtctctaattatatcctgttggatgagtttgactcccaataagtctgctaccttgaggatacaaggcagatttttgttttgtttgcctctgagttctacctgtagaaagctagcatagctctgtgtgtgtgattggtattccaaaataatttgttgactgagggaataaaccattggccgctgtgttcctggtgaactgagttgtcttgggaattcagctttgtaggcagggtcttactgtcaactctaagaaagggaggccataccttcattagcatctggaggatgtgcaaagtgaagccttcctgtggtagtggtgagaattgatcattcacacaaccattcattcaaccaatactattttctgtcttctatgtaccaggcagagtgataggtgctgactataaattgatagataatatacagacacacccaacccagaagagcttacacctctttgagggtcttggactctaataggagtcatctaatgatgatgtcttcattgttctcacctgtattcattttctactgatgagtaacacatgaccacgaattttgcaacctaaaacaataccaacttgttaactcagactgtgaagactcacctgggttatctgccaaagttctcacaaaaccaaaatcaaaggtcagccaggtggagttcttatctgaagcttctgaggaagaatctcccttgcagctcattctggtagcagagtccagttccttgtggtcgtaagattaaggtccctgttttcttgctggctgccagttggggttttctctcagttcccgcaggctacccttaggtcttttccatggggccacctccacctttaagtctcatacttcccctttttctaccagctggagaaagctctgctcttaaaggattcatgtcattaggccaggaccacacagatagtctccccttcttatagtcaatctcccaatataacatcacctgctcaccaaggagcactcacaggggagaagattttacaaggcatggatcactggggtcaccttaaaatctaccagcacaccacctctgcccaatttcagtcacttaatcacttcacatgggcatttgccacaatctaacaagtgtgtttttccctgtcctgtctcatccatatttaatcagaggtcacaacactatacctttgcatatgcccgtctctcttcctggaatgctttccttgatgcttatcctccaacaaaatcccctttaaacttaatcctccttaagactcaaaggttacaccctctgagggtcttctcagcacccagccacccatcagagttaaataatcccttccctctgttttttatgagacaatccatctcatcacaccagaatctaatccagactattatcgtcttaaacaccagactgtgaggtctctgacatcagagtttgtgtttcattcatctttggtttcccagggcctcccacggatattggcacatagtaagtgctcggaaagtgtttgtcaaatttgaattgacctgaactttctatcctctgttctgcggattcatgattggaagagcagcacagatttgaagtctagtttggggcataaagtaaaatatctgcaatttttacctcccagcatggattatttggtgttctgattattgaaccctaataagccattatgaaaccacaacacccccactttccatccatgcaatcaacatgggatttccttactaccccatccaagtatagactcacctatgactcaggctttgctaataagaggcaccgtgattgattccaagatggacacctgatgcaattcagctgatgacatgcctttcatcctcttacaccctttgggaaagcagttttctctttccgtcggacttgtggagctggtaaaataaagacttgaagcaactagtggctttctctgccaccctctaaaggaaacctcataatgaaccaacacagaaaaaataatagaactaagagatgacaacagagaaacactgagtcctgaagacatcatgagccactggactgagccacgcctaaagcttgtcatcttttgaattggccagtaaatgaaatctcttcttacttacatttccactgacacactttcccgtttattaattagcgttgggtttctgttacttgcaaccaaaaccaaaaccctgaaaaacacaagacagtaatctctaattatggggaaaaaatccaaaaataactaaccccttcttacctcattagtcttcatgaaaactgaacaaatggggtcattggaaatgccactgcttccaagctcttcaatactaacctgctcaatcctttttactttgtgttggaatgcaaagaccaaggatttggggactgatactgtaatgagtaacagaacagagagtattgttcattactttcagaagcagcaacttaagtcttgaagccaagtttttctaagggaccccaggtgtgcaatttgcaagcaaatgacaatctacatgactattgattgctttgaccagctaattatgagtctgtaatttcctgggccctaggatttctctcctatttcctatattggaactccccttggatctcatttgtttgccccaaatgatccctagagaggaacttctcctctcatcagccttccccacgtccttctccatcctgctggcctctcaataactgtgtcaccagatttcaaagggactttcagcttattgcataatcagttcttcctctgagacatcccccacccccatcattacctcagggtgttggaactttgctgtaagctgctcacagatcattaaagatcccagctgttcctggtccataacaacccctttcaactgggtctccttccaggaacagctgcaaaagctccagaaaggaagggaggagacacatttagcatgataacaaatcagtagggagtggccagtttacccagaaaggctgtgatgcagttatatccacccagcaactctccccaccctctaggagagagacaaattcgtgctgcctctgtgtgaaaactcttcatatctaaaggaatgaaatcaagaatcacaacccacccctgctccctggagaggaacctggacaaggttcttgctttttccatcatcattcacaaaaaggcctgtcagtggttacaagaagattattatcttgcatatacatacatataacatatactcacaccaaattaacaacatggaagaaggagctgtcatctatctcatgcagggcactgtgcaaagagttcaacatatgtttgcaggctgggcgtggtggctcatacctgtaatcccagcactttgtgaggccgaggctggtggatcacctgaggtcaagggttcaagaccagcctggccaacatggcgaaaccatctctacaaaaaaatacaaaaatagtagctgggtgtggtggcacatgcctgtagtcccagctactcggaagactgaggcaggaggatcgcttgaactcctgggaggcggaggttgcagtgagtcaagatcgcatcactgcactccagcctggacaacagagcgagactctgtctcaaaaacaaacaaacaaaaaaaccagatatgtttgcttgtgaatccttctttaaaaacaaatcacttattgataaggaaatcaaggcacaaggagattgaataacttgcccaagtttgcacaactcagaagtagtggagctgggatttgaactcaagtcgatctgactcaagcctatgctgtcaactctaatcccattccaatataagacccattcaattacctaattggtacagagtctgggatttagtgggcaccattaaagtttcatttaatgaatttattttaatgaaggcaaattcgtgccaccattcttccgaaatgcactttaccccaatcactttatctacctggaaaacattgaatgattgtgcaagatatatcttaattttcatgtacagtatacaaagactttacaagaagcccctttcccttgttcagtggacagtcttagtcattccctccacattgtctctattattgcctatgtggcacaattctgtatgtatcaaagactttagttgtctgcctaccccatgagagctaagcaacattgccttgaactttctcctttcatggcttcaggaaatgctccctcaatatttctgctaattcccaagggttttacatctcctcctctgttctatctctcaagctccagcttcctctattattgcttttgtctatcactacaccacttgggaataaaatttaacacctttaatttctattatacatcaatgtcagtttttcatgcgcctcgtaatttggaagggagggcagcaaaaggagtcaagtagtctagcactccactttctaccatcttgtttgctcctacccttacccctctctgcactcctcttataagcaatataattcctcaatttcttcacacaatgtatacagagcaatttccccccaaattctggtaccaactaacatccaggccttggaaggaaggaacagcaagagatgagagtagagtataggaaaaggggtggggactcaaatcataccaaaatccctcatgtatttaataattatttcttgagtatcccctatctgtgagctaattaggacacagagatgaagaaaaacaagatgtctattgttatgaaggttacatcctagtagaaggaacacaaagcaaatgaataaacacagtcctttccaactgtgatgatgtgaaagtaacctgtgaggtggatggtgactaattaaggtagagtggccaggcatggcctgaccttagaggtgatatttgaactgagagttggagaggtgaaaaatcagccatgccatgaacttgagacaagggttataaactgaaagaactataagggcaaaaactctgaggcagcaacaagcttttgtgtgttctggaaaaaaaaaagtgagaaagtagccgtaaaatatgaagacagagacagatagtggcagaacacataaaaggtttttttcttcactccagcggaaatctatgggatatttttgacatatgagtgacccgatctaatcaccaaaacattttttttcaaacaaaataaacacttcttcctatttatgcatgtattttccttaccagactatgagttccttgaaacagacaggcattggacaagttacctcatataaaatgatgaaatgacatagacatagctttatgttttgcattcttctcatttcatgttttacaaatgaaaaatgcttgaacaaatgaataaattattattaaaaatacatgcttaacatgcatttcaatatttaaatgtatatataaagcaaagttgacagaaataaaaggagaagtaaacaaatctgcagtcatcatctaagggttaaagaaaagtcatgagaaaaattaaaaattatttaaactgaatggcaatgagaatactatatgtcaaaacttgcgatataaagcaaaaacaatgcatatattagaaaaaaagatttaaaattaatgttctaaactttcatttttaagacactaagaagtaaaattaaatctaaagtaagtagaaaaaaggaaataataataaaagtaggtatcagtgagctagaaaacagaaaagcaattaaaaaatcaacaaaggcaaaaaaacacatgttttaaaaatattaacaacttgttaaaccccaaacaacactgatgaagaaaaaaaagatagaagacataatatcaagggaaaaaaagcagagccatttttgcaatttctatagaaattgtaaggataatgcaataaatatatcctacaaaatgctcttagccagaacatgtaaatatgtaaagaattactacaaattaataaaaagaaaaacaaataatccaatttttttcaaaagtaaaaacattaaaaggtaattcacataagagaatacacaaatgtaaattaacaaataaatgtattagtcgtcaagaaaatgcaaagtaatggcaaaaactgcaattacttttgcaccaacctaatactaccacacctacataaggataactaaaattttaaaaactaacaaaattaagtttgggtgaagataaagaacaaccagaatctgcggacactgctagaggaaccacaaattaatacccttttaacactgtttattagtatctattaaagcaaacatatatgtctctataactcgtcagttccaatcctgtgtatacacccctccaaaaggtgtgcttatttcacagcagctctgtcatcatatcccctaactagaaataccaagagcaggatggatgaatctcacggagagtattagacaaaagaaactagacacaatcagcttcatgctgtatgaatccatgtctatgaaattcaaaatcacaaaactaaaccatagtgctagagatgtccttccaggtggtgtgtgttggtagtaagagtcatgaacaagccttctggggcactggaaatgttctatgtcttgatctgcatgataatcccataagtgtgcatagatgtaagagtttattgaatcctatgcctaagatctgtttacttcactgtttgtgaattaggcctcagttaaaaggtacaaaacaaaagttatgtattatttaaacattccttaaacaaacaaaaacaagttattcattaaagcaatagtcacgctgcatgcagtggctcatgcctttaatcccaacactttgggaggccaaggagggcagatcgcttgagcccaggagttcaagaccagcctgagcaacatggtgaaatcccatctctacaaaacacgcaaaaattagccaggtgtggtagcatgcatctgtagtcccagctacttgggagaccaaggcagaagaactgcttgagccatggaggtcgaggctgcactgagccatgatcatgccactgctctccagcctgggccacagagtgagaccctgtctcaaaaaaaaaaaaaaagtcatgtaataataatatagctgatttctccccactggcaacatgctcccccagcataaaactatgaccaactcataattagacttttacttcttggagcctactagatgttcaatatataattgttgagtttacagaattatagtaatggaagggcataagtttatctgtttccccttttagagagctctctctaactcatctgatggtgcagtccagatggtatatctctaggaattcattgtttccactatgttgggccaataaattatgccagctaccacatggagatgttcaagcttctgaaagtaccaacctcacatgagcttagaagctggcagacacctgggaatgctgagatgtaacagaatgtccaataatgtgaagtgacgtcagtgaatgcttgggaaggtgcaaaacataaatagaattcaaaacagtaagacaatagtgtagcaaaagtgaggtgactttaagaacttcaaaatgaggttagtctctgaagataaaactgctaaaatctatccctgaaatatgagccatttatcaatgttgaccaatcagttgttagagtttggggaaatgctcaaattttaatcaaaatacttagggaatagcctcgaggaagcacagatgatactagtctacctaaaactgcatacacacagcatcagcttggcacattaacatgagctaacttatcagagaaaaacaaattgatttttggtaatttggccagagctgacacttcatcaactgcattgactctcgttggaaggaaaggatgtgcaagcatggcggggatgatgggcatgcccggggatgacgggcaggccatcctaaagggaaacagtgtatcagcatttaccagccctgtcttgactttggatcaggaagcagaagtattctggttaatagaaaaagttgactgttgagggataagtggagttttctgtatcattcttgcctagctacaatcactttgggttagaactacctccctttgctctgatccctttactcagaaatgtcctgggaaatgtagagaggccttgtttaatttcccatgggaagccacatatgaggaacgaatatgaccctgagcaccaaggtctggctgctcatcatggttattaagtaacatttgttagttattctgagcagtcacttactgagctatattactcaggataggccgaaagtgctgtttcaaaaaccctgaatctcagtggtttaacccaataaaagtttagtgttttccctcacttacggtcatgcatgagtcttgggtgggaatggatgaggaagccctaatccacacattcaacgaggaacctaggcctctcttatccttgacaccatcgtcccccaggtcctcagagatctcttatttcaattgatagattaataaagagagaaagaattgcacatagaaggtttgctgggccagtttgaatggacataaaatgcgtattcacattccaatggtgggaagtgattcacatggtcgcatctgactgcaagagaaattgagaaatactttctgagtactcagaaaagagagcatagaaattgtcatgccctaataatctctgcctgttgtactaaatgttttatattaattatattatgtaatccttatcacattccttaaacggtggtagaatcagagtactgtaatcttacaggagaggaaacagaagtatagctgggataagtaactcgctgaagaacagggaactaattgtatttgagccaaagcaaggttagaacacatctctggagttcctgcttttaaccactaagataaactatatttattgtggcaaattaatattaaaatattagccttcagatttataagtttcagggcatttacaagacagtgagtttgaactggaagactagattctagaatacggtgaccctccaaggcacttcctcctctgaggccatgatgaatgtccagccaagcctgcagtacatcctgtctggacaaactaaaacaaataaggatatgagttaagagtaaatgaggacttatcaccaagccaagctgaattcttcaaatcttacatgagttgaactttttaaatccctaccacaactcaatgaaataggtactattatgaagatattgcaacacagagagattaagaaacttgcccaggaccacacactcagaaaggcccggagccagagttagatccaaggcaacttcagttctagaatacgttctctgggccactatgttaaagaaaagttcaacaaggatgacattaactctgttggtatactgttttcatccacggtgattcccataatcacccacatagaatgaaaacttgatgtaactcatgtatcatctcctcttccaaggaggacagggcacttcttcacacaaaaaggtacacgggaagtatttatgaaactaaaattatttaagttgtattaaattgaaggttgtaacatggtgccctttttcctctcatctatatccatctatatccataaaattaaagatagctaagtattttatataaattatctcatttaatcctcataaaactcaccaaggatataattttacttccatttaacaggtcataacaccaggttttatcataaagaaacaaagtctgataatatctgacttatatgtgagaacaaacttcctaacacttttataatgatttctgaacatctctctaaatgatgagaaatatcctactctggcattccaagaatataggcggttgaaaattcaggactttgctttcacaattctatcttttttacttccagggaagtcatttccgtgaagcactggtgtgaacaacagtcacaagtgggaagagcaatggaacaaggaggaggaggaatgaaatggtcctataattttagaaagagtgtgaaaaaaagaagttagacttctaggttctatttctggctctgcttctgttttcaagccagccagccatctttctacctttttctccattaattgccaaaggtggagaagaatatagactgagtatgaagcaccttgtcatgcttggatgaaagatcctgtattatgacgagcgcaaaaccagaattgatcatgttgtgaaatccacactgtgttgtaatatattggtttcaagcttttcaggaatacttttgctctgaattcataaggttagagaaggcaaaattgcattttaagatgggaatgccaaagatggatgtagcccattgaaaacaggcaatggctttgagcaaagctagccccacaataacttgtaatggtagtgaagtttgtgatccatcatatgatcttttcttcctgccttttttcttcctcattaaataacccatttccctaagtaccagtttgtatatattatctttattattatttgtatatgtgtaaggagcacaaatgcaattttattacatggatatattgtgtagtggtgaagtcttagtttttagtatatccatcacccaaataatgtacattgtaacccattaagtaattttttatcatccaccctctactcaccccccaacccttctgagtctccaatgtctatcattccacactctatgtccatttgtacacattatatagctcccacttataagtaagactatgtggtacttgtctttctgtttctcaattgttttacttaagataatggcctccagttccctccatgtttctgcaaaagacatgatttcattttctatgtccaaatagtattctattgtgtatatataccacatccaatcatccactgatggacacttagattgattccatatctttgctattgtgaatagtgctgtagtaaacgtatgacaactgtaggtatctttttgacataatgatttctcttcatttggatatacacctagtagtgagattgcaggatagaatggtaattctatttttggttatttgagaaatctccatactgtttccatagaggttgtgctaatttacattgccaacaacagtgtgtaagtgttcccttttctcctcatcctccccaacgtctgttattctttgtcttttcaataataaccattctgactgctgtaagatgatatcccattgtggttttaatttgcatttatctgatgattagtgatgttgagcattttttcatatgcttgttggccatttgtatgtcttcttttaaaaagtgtctattcatattctttcccactttttaatgggattatttgggaattttttgttgagttgcttgagttctttgtaaattctggacatggacccctatcagatgcatagtttggaaatatctttgcccattctctaggttatccattcactctgaggattatttcttttgctgtccagaagctttttagttcaattaagtcccatttgtctatatttgattttgtggcatttgcttttgaggtctttgtcactgaattctttgcctagactaatgtccagaagaattttctctaggttttctcctagtatttttatagtttcaggtcttacgattaagtttttaatctatcttgagttgattcttgtatatggtgagtgacaggttatccctctcaagaatactgcgtattcgaggaaaaagaattccaagaaagaaactgtgtggacagcattgtggcccattaactatccttccagtttgatattcacataaatatcctcctgttgagggaggatggtaaaggagaagtagcgctgaagaattctgaggtccttttcaatattgtgaagtattctttatcaatgaaggacagttgttgttgcatttaactgattagggctttcccaatacccatcctaaattactagcaatagccattctaaattactagcaatagccatcctaaattgcataggttgtggtagttttcatcctgagcactgaaatttcatgagacatactgcaagtttttatggagaagagtgtgatcgtggtgacatgcttagtgtgggcgtgggtccatatggtcttgatccagcgatgtagttttgactataggccatttatttgtcacagagttctaagaatatcaggtatctcttgaactcctccttcctccaacttaaacaactggtccagggccatgtcaatactgatgtcaatgtcaagcgtaaattacttgtgatctgtaaacaaatctttacaatgccaaagcagtgtccttcagaagtaggaaggtatctctttttcaaaatctctgtcatatattgtcccatatttttcccaaacaggactttctcctcaggtctcactggtagaaatgggttcttcaacctctaccagacccctttccatcagacatcagtatgaatttgttggtttgtgttcagatactctgatgttctcctcatgttcttcaaccctcttccctctcacaaaaggaggcacatcattctcttcttagaagaagtcctcttaatctgatgtaaagcacctcagataaatagaaggctaaaggctattgtctctaccacttcatagataagcccaggcatcctgaatctcttttacactcacctgagacctccctccttcatcctattcacaaaagtacagatgacaggctcatacggctcagcatcacaatgtcttcccaatcctgtttcattaatttctaaagaattacactaaaataacaatcttcaaaaagtgcctatgtctaagaacctcttttaaagtaacttaatgtttctttctctcatgcaacaggtctctacttttaaaacttatgtatgtggccgggtgcagtggctcatgcctgtaatcccagcactttgggaggccgaggcaggtgaatcgcgaggtcaggagttcgagaccagcctggccaatatgatgaaaccccgtctttactaaaaatacaaaaattagccaggcgtggtggcagcgcctgtaatcccagctacttgggaagctgaggcaggagaatcgcttgaaaccagaaggtggaggttgcagtgatgagctgagatcacgctactgcactccagcctgggcaacgagagcaaaactccatctcagaaaagcaaaaaacaaaacaaaacaaaacaaagtatgtatgtgactctcttaacaactaaacctcctctattaggaatcttactactgtgttacttcatctcaaatcttttaatagtctcctggtgactttgagaagtatcatgaagaaaacctctccattttcactccactttgaaactggtcatgtcttgggaactgactcattctactaaccatatagcaaagagaaaaaacatagttcttagtttaaaacatgagcagttgtgtcacacatctttgtgttttggtaaattcatcattagagagagaaaaaaacatcagtggagtttaaaccctttgtcttgttaagtcacaaaaaattcgtgggctaaataaaccatgcagtgtcaagttcatgctgtttctataatctcattatttctggttcctcaataaaagcagggtaccagttattctaatttcaaagtgcctccctacactctcacacagaaaaccttggttaagaaataaaaagcatgctgtcattcaggcacacatgaggaggttagtcattttggttcattatttctaaataacacaacaagcccctgaaatttttgtagtcttcaaatggtcctgcaaatcgatgtcgaccttgcatgttagaatcatgattgcctgttgtgtctctttgattatttaggggaaaaaaaaggtattgaaatatatactaatggattatttagggaattagagtgtaatgaacatgggttaactttagtgcttcagagcagtatgagagctacacggttaccagcaaaggatgggagcctcctgaaagctggaatgctgcaaatatatctcatcaccttcaaatcctgaccactctttttttcacatgtattaatttaacaaatattattgagtatttaaagtgtgccatattctgcctacatctaatggcaacaacaataaaaaatcgtgatccttcctccaaagctcaaaagctactagagacactgatctataaagggatcataatactcaaataatataaaggatataaagaatgaggatagaaagtgcaatgggaagtcaccatattaatagattaaagaaaaaattcttagcatcctcttcataggtggtaagaagtcatgtgatggcattcaatctcctggccacaaaagagaaaccttatttctcctcacgaaatacaagaaaacaagcagaggagcttgttttcttccagtaaggtgggcatataacaatgcatgcttatccccttgttcaatcagctactggtttactctcttcccaggacagagggagtagcaaagctaattggttaattgtcattcactgagccttgtcaaggtaacctcttgcttctttagacatttgggctccaaggcagaaatggttcttctttcttctctgcttcttgtttcagcatgggaaacttttccgaagaagaccttccctaatcccatgggttaaaattgtctgctcaatgacatatagttctatgagctatatcacagagggtgtttcaggtcttttgaatttgatcttaaaagcaataggaaatcattgaagaatattaagcagggaagagacatgatcagttctgtgttttcaaaagttcaccatagctgccacatactgaatggtttgctaagagagcagttcagaggcctctgctgggccttttacaggagcgatggatggagaaacaaggatagattcaggatacagtttggagttagaacacacagctctaagtaattgaagagttgcagaggacaagggaaaggaaactgacaaggataatttccgagtttctgtcttgagcaactgcatgtatggaggtgtcctttttttgagatgggaaattctgcagaaagagcgcattcaggaacctggaggaggatcaggaactcccttctagacaagttgagatttaggagatatatacagaagctgctagcagtccagttggatattcgagtctatagcacgcacacacacacacacacacacacaaacacactctctctctctctctgtctctcacgagatgactgagatgaaaatataaatttcaaatttgtcaacatacatagatgatatttaaagccctgagtgtgaggtgatcccctagggagaagaaaaaaatgaaaggggaaaagaaagagattaagagaatgagacatggttatggctataattagctactgttaactgtcactgggaaggacttgtctttgagtacacaaagaataatgggcagacttactttccattaagatgataggatgaaggtgtcaggaatgttttctatgattttttccaggccaccccagtagttggcatctcctcccctctcccaatcccaaatttcatcctcaaaggtacaacactatgggatataagaagccttgttaagtgatagtagaggaatactctttttgatgtgtgttatttacttctaggtattaagttttctcccccaagagtgccatccgcgaatttgtagtgtttgtattctcactagctctgttagccctgttaaccaagtgaaatctccatgtgagaagccagagggtagctatcaaatcctaccattcagacactttatggaaatgaactgagtagattacaaaaggaagagccaaatgccaaataccatcctccccacatcagtccctaggttgacatttaggcaacagcctctgagtctatgaggttttctgagattgttcagaaatctagccaaggttactaaaaacttcaattcaagagccagtgggtctttgccacttacttagtgcttcatgaatatgcacttcagcatgtaccccttcctgttcttttttttctctttccttttctctgtgatttttatacatgatgcccagctcactatgggtccagcacaaggaaaagaggtatcaagtgtgagaagaatatgtgacagctggtgccatagagcccccatcaagggggaaaaaaaaaaaaaaacagaataagaccaatttcagtttttcctacagtgcttggaaaatattagctcacttgtaagccaaatttgggtgtactcatagaaagcatttcaaggcacagaattgttatttagctaaatgtgccaagtcaattcactcaaggttacagtataaccatccatttcttctttactctttccttttatgtttaatgacccctctcaaaacgggagatggtagaaaaatacacccaactttttgctgttcatggtgctaacactcagggaatctactatgacagtcgtcctcaaattttaataggtgtaagaatcacctggagcatttgttaagatagttttatgcaccccttctgattcagcaggtcagatgaacttgcatttctaacatgtctgcaggtgatgctgatgctgctggccctacaaccatattttgagaaccaatttgtacttgatctcccagaggtcccagtggaaatgagccccagttgctcacgtagtaacctactcagtaactcactctttcttcacttctttcccttccccgcgtgatgttcctattcctctaaccagtgttttctgggatcatctccctaataaactattttcactcaaatctcaggctcagtggccatttctgaaattaattcaaaccaagataaagacagagccacagggcaaataagcaaaaaggaaagcaatgggaaacgtctcagcaggaggctgcccacgctgctgtgcagagcactgctgcagcctcagggctcctggaagtttcagcggtatgctctctgcaagcctcactccagactcagtctcaggccagagcattaggtggactaagccttggactaatgctgcttttttggctgcctaaatgcccaagttcaaaatatcgatataatcttggatttctcactctccatttccctttatcatccaattgatcatcacatgttgccacttcagcctctttacttcaaagatgtttcctcatccacatcctctatgtccagttcaggccctccctcatcctttttcccttggcaaacaagagtcaagtgactgatgtctctgtccttagtctggtctctttcttttttgagacagattctctctcgctctgtcgcccaggctggagtgcagtgatgtgatcttcactaattgcaacctctgcctcctgggttcaagtggttctcctgtcttggccttctgagtagctgggaatacaggcgtgtgccatcactcccagctaattcttgtatttttagtagagacgggatttcaccgcgttggccaggctggtctcaaactccttacctcaggtgatcagcccaccttggcctcccaaagtgctgagattacaggcataagccactgttcccggccccctcttctttacatccttaatactgatgctagtataaactttctagaatgaaaatatgaccagtccctgaaaaccttctggtggttccttggataaaggccaagatcaaagaaggccatctataaccaaatccctgcttagttctccagtctaatctctcatttcttccaagcatacactgtacacttaagtcacatcaatttactttcatgatcctatacagatgctctctttcacctccatgcttctgctgacatgcctggaactcacttattcaacaaatattatactgaactccaaatctatgccagatactgttctagatggtagttatatagctgggaacaaacatgataaaaattctgccctcagggagcctcccttctcacatggtgagacagacaatatacgaaatcaataagaagaatgtcagatagtgacatgtgccaaggagaaagaagatacagtgcgatagaacaagaagttcaattttaaatgggatgtgaagggagccctcaattaaaaagaatacatttgagcaaaatcctcctggagagaggcagtgagtcttgcagatatctgagacaggttgtttcagcagagggaacagcaaggctgaaaacccatccttgttctccttttcctgcctggattcccttatctaattcatcctccaggttggatctctcctgctacctggagccttgcctaactcccattgtccattctcaactaaacatcccacctctgtgctctgagaacatctggccatgtgcttattacagcatttaaaatattgatgataataaattgcagttaacatgtgtaacgtacttactgaaggccaggtattgtgtggttcacttggatgacctgctttcaatactcatgtcactgtaagaagttgtgtatttatattatctcattttattatctcatccctgtctgctttacaacaaggaagaaattgacacacagagaagttaagtaacttgtttaacatcaccaagaattctagactgggcttttggataacagggacaatgtagctcccatatgtgtgcccttcacaatggtctagctctcaaaaaggatcactagctcaatgcttcaaaaagaccttaacatattcatttagtaaaatggaacttctctctgtatcttaccaaatcatgatcacatgaatctatacatgtttgatgagtatgtttgtgatgtataacttaaaagtgaaatttatttggtgagactctggggtcacctcacaaagaaagactggcatctttcagagaagctggtatggaaatgaatgcaaagctgtttggctgcaaattgggagagacctgctctatgaattaagactccatagactgagggaaacagtaatggtttcaatgaaaagctccaaatggaaaatcagatgttcagaatcacagatgttgatgtatcatcaagccgcttctcacatgagcacctccacattgctctccaggtgagtggcaagtctccgggtgagtaactccagggagttatttatataattatggtcaacaattctcccaagcaactccatgtgggcttgcaagtgtctaatatttgtgaagttctgccagctaatcttaccatttctcagctccagaattgtactacctgtctttctagcctagtgtttcctaagtggcaatgattttgccctttgggggatattcagcaatatctggagatgtttttggttgtcacaactggtggggtcaggtgctactggcatctagtgggtagaggccagggatgctgttaaacatcttacactgtacaagacagtctcccgcaactgagttatccagtccaaaatgtcaacagtgccacagacctgtcttgttgccttttataatccaaagtagctccctttggttctcacccaatgatgtgtcaagagtataagcactgtccttgctgttgtttactggggagaattattgttgcattacatacatttcctgaagttgaattgggatgaatcattggagcaaaaatgattctcaggttgctgcttcagcctggcatgctcttcataccctgtccttggggtgaacactaattccccttgaaactcagaagtgccacttccaatatgaagacttctctaacaccccacagggagaaataatcaccttttcctttgcaccccaaccatatcccgtacataattccagcaaagaaaccataatacttcattgtcattattgttacaagcctgtctcctttaccacatccccattagcccttcactggagctcagagaccatgtcttactatttttcatttcccatgcccgtagcacagcacctggcccttaatagacatttaatgcacgtatttgaaatgaatgcattttcagggagaaatctggttctcgcagttgttctacattcagctactctaatttttaccataaatgtgactttcttctccagtttccaaatagaataaaagccaagcaaactacgtggcccatccctttgccctcagcctcatggcccatattactaatgttcaagttcagaagacatttatccaaagccccaaaacagcaatatgaaagtcctagtgatggtgggaaaggatgataaaaataggctgcttaaaaatcaagcacttttgcacagaaaaaaaaggagaggcaaacagccactggcaccttcctgtgagtaacagaagtttctattttaaaagaaaggcagtcaaataacaagcaactttatcacaatgctgctttcccagattttttggccaaggcaacacatcagcctggatcagactcttggcattccatgatggaccccgctccaatgatgattcatagcagccatgtgaggaatggagactttcacacgaactcgcctcttaaaaaaaaaaaaaaaaaaaaaagccagctattgctgatatctccagatatcagccagtaaatgcagctctgtcaagcctgcatgtggcactcaactttcctcggtaaatgacaaggtaagtgatgaggtggccaaaggcctggcctctcagtggttccccatcattttactctcaggtagccaggatgtttcctctcttggttcagtgttcaagtatcccagaagtttcatgaacacagtggaaaaacaaatctaatccttgttttctttcttcactcttaaactttctttggttttgagtaatctgtgtagcttttggatggctttcacattaggaatttaaaaaaaaaaaaaagttccccttacatcattttgacttccaggtattaaatagttgagatgtctaagtttgtttgtgttttcattaagttaacgtttctatcaccgtctgctcctgataggcttcaagaaaacaatgctgaccatttaagaataaaacagcacagttcattggaaggaaacagaagggatgaatgctcctcgtagcctaaaccgagttgattatcattcttgggcacaatgttggcttcaagttttcctgaagctaagccagaaaaaagaacagattgcaagtgtgtgcatgtcaacactgaggaattcggatattgaaaagcggggaggcaggcccccacatctctttcctgagaaaggctcaggagcagggggagcagcctcctgtccctcctaagagtgggcggtcctgccctacacaaagtctggcgagaggaggaagtcactctgggactttcccaatgataatggcaacatgtcgctggacttctgtctaaatgacgtgctcaagggcacagatccaaaagagaaggtctagaacccaaaatgagagcctactaggcaggacaagcagggtgctttttaggtctgtgatgcctgacttttaaaaagcagtcccaccatggaatttctaaaattcagttgattctttcaaaatagcgaagccaggttggtctcaaactcctgacctcaaaccctgtctctactaaaaatacaaacagttagccgggcatggtgatgggcaccattgcactgagtgacaagagtgaaactctgtctcaataaataaataaattaattaatttaattaaatagcaaagccctaacaacccagttgctattataagtatctgccacttattaagcatttttcagtcaatcctcacaataacacaataaaaaaagtaaggacacttattaagagcttccaggtagcaagcacggttccatgctctttatgtacttacatactttaatgcattaaactctttcaacaactccatggagtatttactatgaccccagtcttgctggtgaggaagttgaggcacagagttatttaatggtgtcaccatcacaggagtcctgactgggggaggtccagtatgaacctagatttctatctcctagatcatgcctttatttatttttaaataacagctttatttttatttatttatttatttatttatttatttatttatttatttagagatggagtcttgctctgtcgccaggctggagtgcagtggtgccatctcggctcactgcaacctccacctcccggattcaagcgattcccctacctcagcctcctgagtagctgggactacaggcatgtcccaccaggctcagctaattttttgtattttagtagagacggagtttcaccatgttggccaggatggtctcgatctcctgacctcgtgatccgcccaccttggcctctcaaagtgctgagattacaggcgtgagccaccgcaccctgccaataacagctttattgagatataattcatatatggtataatttattcttttaaagcatacaattcagtgattttttagtatattcagagttgtgcagacatcaccatgatgaattttagagtattttcatcacccccaaaacaaaccctccacgcattactgatctctcccatactccttcgttagaccttggcaaccactaatctactttctgtctctccagatttgcctcttctggacattttctctaaatggggtcatataatatgtggtcttttatgactggcttctttcacttagcataatgttttcaaggttcacccgtgttgtaacatgttttagtacttcattactttttattgccagataggtcacaggtttaactgctacactgtgctcctctgaggctggtattattattctcattttacacacgagaaaactgaggctccatgaaataaaataaatgacctaaagtcacacagatagccaaaggtggatctggcatctgctgaccccaaagtcatgcctcaaaaccctgccctattgcctccacagcatgtccttccttagagaagttacctgcacaagggaatttagtctcacgtgtcctggtaactttcttttaacttccatgaaaggtgataaagaaatgattaagaaaatgcacttcagaattaagctcaggaccaagctgtgtgactttagacagatcatttaacctttctacacctcgatttcctcatttgtaagagaagaataatgacatccacatcttagagttcaaagacactgattgtaaatagtgtggtccagtgccaggcacacagtaagggctcagtaaatcctaattcaatcaattagaacactgttctggggcggggggtaggcattgaggcaagtccaggacaaagaaggaggttcagctgcggaaaaaaggaggaaaagagagagagcgataaaattacgttgtatgagaatgttgtggttgttttcatgcctgtgtctctaagacaaatcagcaacatggaacatttgcaaacacttgatccacaccaagacgtctggagaaggccccaagggagagctgctccgttctgccctcccttcaggccagctgggggtgcctcacttgtttccaatcctaaatcatttgttgtcaaagaattcaaaaattttgagttggggggtggagatttcagttttcattctctgggaagccaaaataggctaaaacagtaacctcaacacaagcatgccaattacatattcaatcaaatttatttctgcattccacttcatgcaattagagaagataagtactagtttcaggatacacagtaggtttctgagtttttaaattaaatcatttataattaattgaaaattgtctttctcaaaagcaatgcaagcctacttttgagatcttactagcaggccctgtatcaatttggaaactgcagacatacaacaagggatatggaaaagacaacaactaaaataagctctttttaaaacagaagagaaagaggcaggctatttaatgttacaagctataaaagagcaagttatttcaatcactaaatgaatttaatttttggttttttgcctgcaaataaagccttttattcacttattcaggtaatgtgcacctattggtaacataccgattctgctgcaggtttcagagaattcattctttgtcaatgaaattttttaaaaaacagttgtttatgcagggggaacaggaggaggtgagctgatttgaggacatttttcgatggttccgttcatgctcaagaaaactgtacatgttagacctaaatcattgatctacctagacctggactctgcacactaatctaaaatgtttatattttggaaagcagagggtgagggaagaagcacattagcaaaggttgcttggcaccatcccgggctatttaaagatcatgtgtgcattgattcaaagaataatttataagcatctattacaataaagactagaagctggtggctggagaattttcactgtagtaaaccttactttggtggccactaataaaccatgcatgccagcacccatgactggtgtcatcccctcccacaccccatccaatggatctggacttgcccatgggactggctttggccaatgggatattagcaaatatgatgtaaagagatgtttgtcttcttggaaagcttgttttaggaacaaacactcttaaaacctagactccgtgctgtgagaagcacaaattaaccataagcgggagatttgaggccctcgctgagagcctcagctgagttctccaccaacggccaacatcaacttgccttgcctgccatcttggaataatatcctccagcacctattgagcctcccctcatgggtcatactagccaatgctacattgagagagatgagctgatcctgctaactcctgttcaaatttcagaataatgaatagaagaataaacgttgttttaagccatcatttagttttgcagctttagataaccaaaatagtggtctgaccatagcaccaagcacagatgtgaagtgaactctgctcttccagcccaatatgcaccttcctgaatcaccaagaggaagagagcctgcctctgacctacactgagagtttgagaaggctggcttatgccctgatattcccaacaatattctctttaatatcaacagcaaaagtatcatttattctgctctttttaagtgccagagactgccaagagctatcaatgtacacatatgtagcatatcattttgtccatacacagcctgtgagaaatgaaatatctctataagaaggttgaggaaactgagacttaacgaagttaaataatttgcccaagaggttccaggcgacgttccagtaataaaattaagattctaactagtcctttactgctaaagccagctttcacccgggatatgcctcctttacactaggaaggcattgctgacccacttccatagcctgagtctcacattctgttaccagcagaggggtaactactaaggggattctactaatcttacaacactctctagcctttatcttcccaagcatacatttttttagtagttgccaaacatcaggcaacttctgccttctaggaggggaaaaaaaggaacccattcttggcaacatcccactcctcataggtgttctcatccctggttcatctccagccaccagccacccacctcagcttcattaaagagcttgaatcaccaatgggaaaacacccacccctggcctgacctgtcacaaccatactccttgatgttctctagggaaatatgcacacaggggacagggccaggaaaagaaagtgttgttactggttgaatgctggaccccagatgtttgtacatgccagtattgtataatcataacttttatttgcactaggcaaccaaaaaaaaagtttgtgtgactttctttactgcaatatttgctttattgtggctgtctggaaccaaacctgcagtatctctgaggtacgcctgtatgtttcaaatgttaataataataattacaaagggacaaaagagggaagatgggaagaggaggagaatgaagatgggtttatgggggagaaagataggagttctgaggttgagatctactgttaacactccttgtcaatacagcatgccacccactaataataattattcatttttaagtctatttgacctgttaaatagtgaattcattgacaacagggatcctgccttaggtaaatttgtaactccatcttatacagcactgacatatacatttttaggatgatggagactgaatgaatattttttcttaatttctacagttttcctagttgctggcaccttggccctgtgtccaaactccttgttccaccgtttcagcttctgtgggccataaatcatgatatgacaggaagacattgagaaaattgtatttggccaagatgcagaatcccaaagtcttgaattatgccctcccacagactcccttttcaaggaccaaagaagatatacgcagagaagaacagtaaaaaacacacagttgttacatgagaatttagcatagtgaacaaagctggatgatgtgaaggccctgcccagcctaaaagcagacctaagcaggccttgcttcttttccctctggattcatagccacgatgaggggaaatgagtccttggagaatcccaccaaggtcaagcaagccagagagcatttgccctttttagctggtctagtgggcaactgcagggcatccctagagcagagtaactatcaagcaggtgcagcatggagcctatttctgcacctgtcatgaggaagaaagagagaaggagaaagaatgctccaagagatgacaaaggactccagagaaactgctgccacttgggacccagggcggatgccccttacttattagcaaagatgttcaagcctctagcattgtggcacagtaaatggccttgaccttaatccattatcagcatttatccttgaggatacaatttggagcttggtgtagaagaggagcttccctcagaggccaggatagctctgaagacatggcgatttgtttttcctggtacctgctatcttactttgagctgtggtacttttaccttactgtttcttgtttttctaccacatctttgcatctttgcatttttggtcccatctctcttgaccttgaactcaacgtacatgccttatctctcatgagttctctgtgttcggtcttgggaaaagagaacaggaattttcttccagtgaattctggaatcttcatttgtcacctttctcctcacgttttccttgctggaagctgcacacacatactcacacaacacgcatgcatccctttgccttctgtggataaataagattttgtgtctcagagcacaatgctctcttgggctctaccttttggtgatatttttgaaatcaatttaaagtacccttgatatcccttgaaagttttgtaagatttaaccccttaggggaagagtcagagggcctctctttacaccttacatccctcaccctttcaatcccttgggtaagaagagacatctgaaaggttgagatgcagtctttactctgagaacctccctccaaaactgcttcaactgctgacagctcacaagacagaacgttgagttaatacccaatattaaacaaagtcaaaaatcaaatacatcaatcacctaactaaaagcacatttcaaaggaagacatagccaactggatggcaatcctgagcaacacttgccttggcaggtatctgatgaagacactgctctgtcttgcttccaaagtccttctaagcaggcagcttggcaggccagtcttggatggagagggatgcctccagtttccggagccagagctgaggaaggagaaagtagaccacctgcaggcagtacaacactacttcatacttccctaatgcctcactcacattagcacactgatcttgcctatgaccttcactgagctagatcaagatccccatgctgcagtgggaaaacaaatatccattgtctactgatacccactgggtcacttttgcttttgaattcttgaaatctggattccctctcagtgtcctctaggttaccagtacacttatcccctccaaatcagggcatagttgcaactaagcaattaagagaagactggagaccagtgggattggaaggtaatggtgtcactggagtttctaggcttttatctatccagacctctccaatgtcttgtcatgcatcaattctctcatccgatctttttgggaatgccctcatcctgggttaccaaggagcacctgaagcagaggataagtgaatgcctttctcaaggcacagggcaagacattggtggtcttgatttgctccatcaaccccacctcccagatttatgtttgaactgtttgatcctggtgctcacatgcaggaacaggacactggagtgtgaaacgacaaaatacacctctttcctaaagcaaagcaatctatcttgagcacaaagcttgtcatgacactaaagcaaatcagtgtaaacaagggcagagatgagaaccataatgaagagtttgagaaattgtaaagtggtcctgaaaggaagtggtacctcttgagaatagtcctataaagtgtatacctgtcactaaaagatgcccaagacactgaccttaagccaattaccatgtgtagatctgctgtaaccaaagaaggtcacagatattcgattctgcaaaaagcagcttttaaaaataaaagtcaattcttggcatgtgttgcaatacttcccctgttccaaacataatactgaagccacccacaggaccgctgtcttagccaaatacagtaaggaaacaagccttctcgggaaaggcccacatgaatagtatccaagggccaaggtcaggtatcaatgcaaaccggctgcaaaatctcctcttctagcaccactgggcatactgtagctgagtaagccagcgatactctgtccagctttctcaaagtgctgctcataaagacaattccatagactacagggacagatgtccgctggcactcagaacttcagactctggggaaggctctgcccagtttttgcctgtgaactcaatctctataaaacagagttatggcaattgagaaaaaggcctctcatacagtctccatgtaatccagagtatctgctttctgaaataatttactgatcttttccctatacaatttttttttttgagacagggtctcactctgttatccaggctggagggagttcagtggtgtgatcacggctccctgcagcctcaaccttccaggaccaagcaatccttctacctctttcccccaagtagctaggaccacaggcatgcaccaccatccccagtgaacttttttattttttgtagggaagagttctccctatgttgtccaggctcgtctcaaactcctaggcttaaatgatcctcccacctcggcctcccaaagtgcttggattacaggcgtgagccacaatgcccagccctataattctcattgtcatagctagatcattacatgcaggagggcagagacgatccagctctagaagcaactttaagccattaggactgactgcttccctccaaacttaccacacacttgggttcaaaaaaacgggaccatatttcaatgttttgcattattcatgccatagtcctgaactattcactctaattcatctcatttcttgtttcctgcactatttttcctggcttttaaccttctagtctgtcttctgacggatgatctttccttgcttcttgaattgggtcctgaacctgagaccttcttcagcagtgggtaagagaactggctttgaagccagtttttctttctttttttcatattatactttaagttctagggtacatgtgcacaatgtgcaggtttgttacatatgtacacatgtgccatattggtgtaactcatcatttacattaggtgtatctcctaatgctatccctcccgcctcccccaccccacgacaggccccagtgtgtgatgttccccttcctgtgtccaagtgttctcactattcagttcccacctatgagtgagaacatgtggtgtttggttttttgactggattaagaaaatgtggcacatatacaccatggaatactatgtagccataaaaaaggatgagttcatgtctttgtagggacatggatgaagctggaagccagtttttctaaattcaaatcctgatgctgtcatttattaacagtatgatcctggacaagttattttaattttctaaactttaattttcttaactgtaaagtggtgctcataatagcacctacctcttggtctgcagtccagtgctcctggccgggcgcggtggctcatgcctgtaatcccagcactttaggaggcggaggtgggtgaatccgctgaggttaggagttcgagaccagcctggccaacatggcaaaaccccatccctactaaaaataccaaaaaaataaaataaaaataaatagccatgcgtggtagtgcacatctgtagtcccagctactggggaggctgaggtgggagaatcacttgaacccaggaggcggaggttgcagtgagccaagattgtgccactgcactctagcctgggcaacagagcaagactccctctcaataataacaataataataacaataatagcacctacctcttggaattcttgagaagataaaatggtttatatccaaaacaattagaacaacaacccagcgcagctgaattgctcaataaatgctagcagttgtgaggcatttttcagccacctctacagccatgtggacactttagtcagcctgagagaatacccagtacaggtcatctcccagatattttatacctgataatccatgctaggttcactcaagcaaacagagaagaaagcatttatttctctttgctctaacacagaggaaagcattatgataagagctaagattttcttatccagtgattaatttcttattggatccagctatttaaatggagctccacagagagttagttaaattaaacacaaaatttcttcttttttttttttttgtcaaagaaacacttgccttgctcttcactatatagtaaaactcactaataaaccacaacatgtcttacatgtctgttcctgatctccatacttgagtggtcaccaagaaagtattgtacattcaatccatagcatttaatttccatggaccctgcctttaacaggttattatctggttgttaagagaagactaacacataagacattatcaaagaacaatagaaggtatataattaagcactgagccaagtaaatggtgccgattataaattcagtagttctggaaaggacacatcaggtaatgggttatagtaactcacctattcactcaacaaacacttactgagtaccatccaagtgccagtttctgtgctaggctctgaacgtaggtggaggacattgggatctttcttccctgcagtcttccattctttcctacggccccccatggtataaccatcatgcagctgggtcattcattcttctgagccaagcatggtaaattcattcaccttgtcagtgattggttcctaaatgaccattgatgttgagaagaattggcttgaaacttctgggaaagttcctccttggtctgaagaaactatcccaggaagacatacaccttttcccttggttgatgccaagcatggatgtgaagtccttaactaccacttacatcttgccaccagcttgcaaatagagaagcaagggcaaaaaaaaaaaaaaaaaaaaaaaaaaaaactatagagaaacagagtcagtgccattagattaagtcaagttttcatagacccctacttttgggcgtccagtaaaggaatccagtacatttccttattcacattagcttaagttttgcgcttttttttttttgcccctgttatttgcagtcatacatattctaacttatagaacacatgaaaaagacaaatgaaatacaatcagttctcaaggtgctcacaggctattgttaacaaacatgtaatcctgcagcattgtaatttgttagttaagtacaaaagaataatggttcaggaataaaagtatatcaaaggaaggaggagttggcaagatctaagagaggtagctttaccaactttaattagtctttgaaggcagtcagtgaataatgataaaacagtgagtaattggcaataccccagcttatcactgcaaaaattggcttaattcctattgctttgtcaatttcagttgttattactaatgtcttaagatagggaaaggagaatctcttcctagaattataagctaaagaatatgttcctttagtttgattcctgtttctggattcagtctggaagtttctgtttgcaaggctttttttttcttttctttttttcttttgagacagagtctctctctgttgcccaggctggagtgtagtggtgtgatcatggtcactgaaacctctgtcttctgagctcaagcaattctcatgcctcagcttcccgagtagctgggattataggtgcctgccaccacgtccagctaattttttgtatttttagtagagacagggttccaccatgttgcccaggctggtctcaaactcctgacttcaagtgatccgcctgtctcaaactctcaaatttctgggattacaggcatgagccaccatacccagcctaaaggctattttttatctctaaagatgaaactggcttcagaattatagaaaatcagaacattttacccagtgtgcataagttttcgtaattatgtgcatgtaaggaaaaaaacattttttctgtttgatatcattagatggttgaaattacactttcatctatctttctctacagaaagagatttttttctgccagctaaaaaaaatccagatattcattgactagacttgtgattatctattttacataagacttgggcttcatcgtataacttaactgtaatattgaagatttccaagttaaatttgggaaacaatgttaaagccttgctaagattgtggttaggagaagccgtagtatagaagctttatttagttgagcttcaaatgctcaaattaatttccagcattttccaatgtttataaataaaatcattgctcatggcaatgtttccgtgatgggactttctgaggaagtctctcaggagaccactcaggtccccagagttggttagcagctccctacatgctgtctggtgtgctaggaaataaatttacagatattaaaaacctagattttagaatcagactgacctgggttcaaatcctggttctgtaccttattagctgtgttattttgagcaagttacttagtctccctgtgtcattgtggtaaaataaaaacaagctaagattattttgagaattaaatcaaataatatagtcaagtttcttaaaagagtgtctgacattcattgtctttgaacaaatttattgaactagagacataaggcagacaaaagtaacccccatgaggcttctgtaacaaatgctcaacaaataatatccaaatagccattattatttttaataagatctgtttatttcctgggacataaccattatcaagtgctcggagagaaaaatcaaagaatgatcatagattcctccattgcctcctgcctcccagcccatatccattctatcatgtcatgctttgagaatgggtcttctccacttcacctgctgccatgccagtccaggaccgttatgcaaatcatagccctttttttgaacttcttatgaccatcttggccatccattcttcttacatccattctgcacatactggttgctgattttttttttttaccattaacatcattgattttatttgccccaaaccttcaaatgacaaaccattccacgtgaaattaatgtcaactcttcccacgtttcttgagcggggtgctgccttacctcttcttaacatcatgcaccctgtatagcactattttctagacaccctagccttcctgatgctccttcagcaaaccaaaagccgttgctctcactcttctccctcctatatcttcatagagctggccccttatcatgatttgaaagtcagctcaaatggacttccttaggttgttcttctgcagccggtctcaaaataataccctattttgtcttcttcataatatgaaatgagtttgtctacttatttatctttctacaacttctgtagctttctagaatgtaagatgctataaaggcaaatacctcatctaccctgtcagctgctagatcccttgtgccttaaaagagtacatggcacatagtaagtacataatgaatgtttgttgactagtatcatactgagactccaaatgctgcttcagtttattaacaagtttcccaagtcatttaacttcctacttgggggagtttagacccttagagttatgagttcaaagaacagagacccagggaggtgatgagtcttacagaattagttagtgttagagcctagacaagatccctggggcttctaagatctagatgagcaccttgccataatattggtttgctaggcatgagtcctctgaccctctagattgtccagaagaaggcaatgaagtttgaaatcatatcaatcactttcaatggaattaagacctggactgggtggaggaggagaactatgctactgaaaccaaataaagatggtacaagggcagagaaggcactagagtacagaatcccacacacacacaaattacttctttatcaccatgagtggaaggacctcagattcggagctacaagttgtcaacattcaaagcatgtatcgaacactgttctgattaatagaattatagaatctcagcatggaaagataacccttctcacatgttttacaccatttacagtatgtctgcctagaagtcatccacctcactttaagtatctacagttaggaagaactcactgaatcccaagtaagcttattctgtctttcaacagctctgattataagaacatttttcattaaactgggctaaaaaccactgttgtatattttattgattctagttttgccatgttgggttatctaaaggcagctatcatgtcacccccgagttttcctttgtccaggtttttctaatactttttctatggaatgatctttcattgacaaaaggtttatttttgctggtctttccctctctacatggttggatatatcagcattcctcatgaagtaggtcttcaggtataggaagagcagtttagaagccagaactttccttgcactggaaattatatttatgtaatgtaactaaagttattagtctatatgagtactcgcaaccacccccaagccacctccagcccattaaaaataatccagcattgacttctaggttcccactccctcccagtcctactaaggaaggatttttgcttgctgagagagaagctaagttgacctacataataaagtgataaaggggttgtggcctggttatcaaggaagagtttttttggagctcaagtttataagaaggaaacactagagcaactgcgggtataagggaattggagagaaaaagaaaaggtggcattatgaagcaccaaggtggcttagtaatggaattctcttagatgttctccaagaaattcaagtagaaatttctagttccttttaactgcctttagttgttacactatgttcccttgaatgtgacacaccactctatgacaacagtggtcactgaatttataaagttatgcacattaaaaattaattccatagcaatgataatgatttatacgtacaattatttcactgtactaaggagttgacatttattatctcatttaattcttagagcaagcctttgagatacatgctattataatccccattttttcagatgaggagactgtaaaacagaggtaaaagaaattgtttacagctaagcaatggtatagttctcagacccatgtctgtctaactctaaatcccgtacattatgcctcatggtagtccttgagcagaatggcctcagtgcttgtccagaaagaaaaagataaacagctagagggatgagcctggaatccaggaattatctgctgctccagggagaccatactacctaaaacctgtctcaaggctgacagtccagcactgagatcattgagatcagaaacaaaatcaaactgatattgaggtttctggaacattccttagaaaaagatccaaactttcaaaaacttcaatcttattttccacaatattgatggcacaattttagcccatggctatttttttccttcttgaacacatcaattcagaaactttaaagaacaaaattgtgttcacaaaaatgtaattgataaaactaactctttcctagctgactttttatggcttcagctaaaattcaagctaaactgaattccataatggaccatacttcataataattgtagtctatttgtatgcaaatagctgaacgacatctctcaatttcagactctggctgtaaactcacatcagttttgggtagattctaattatgaatctgatataataggtgttgaattaatgagaatctctgacaccagttttgagagttaacactcattattcactatttgaaccttaaaaatggagtatctttatgatagaatgtattgggtggtaccattatctagtaactatttgatctgaaatggttatttaatttcttccagaccacagtgttagaaaaatgagaataataatgattccatgataggattattggataatgaaaaaagataatgtatacaaagtacttaggaaaatatttgtggatcaataaattacagttttttctgctctctgttgctagatcagctgaaggtccctccaagtggccaaaacttagtaactccttcataaggcattgccttgctacagatgtcctcaaaaagcttccttccgtgatgagagcccaactttaatgtgaacacagagacaatctttaataagaactgaggaagcaggaatcaaactcataagacagggccaggtagacacatacataaggtctgctcagggtcaacaacttgcccacctagtatcacataacaccctctggcattaatgatgcccatcctgccttgcatttctgaggacaagggccatagaaggaaggcaacgttctttccaggggatgtttatttttccattaataaagggaaattactttgttggttgagagcccagattttaaaattactcccatggctgtatctaaaaccaattaaatgttttaaaactcaaatttgtttggcataatagagttgaggctgtcagatcttgtgacatggccagtcataaaatgttccctgggaaccgaatggggcatactggggggagtgggaagagagaaatcataatcacttatgttcagaggggcatagcaaatgcctgggtcaaacccagcttctgagaacaggaaaaaatccatccaaatgggtggaagatggttatcctacttgttggcagtatagtgtgattaaaggacaccaggctttagaattggacaaacagatcttggctcacatccgggctctgccctttattatctgggtgacattgggtaagttactgaccttgccaagcctcaatttcttcagttgtgaaatgaggatcataatattaatttttttatggtggctaggataatgtaagtaaaacacttggctcaatgcctcatggattataagtgctcaacaaatgctagatgtagttattgtcattttattgttgtcgtttgtgtgttagcagctattatgtactagttaatccacctattttgtctcttttctttaggataaaacaccctgtgatgttactattaacataccattttatagaggagaaaactggctcatatatccaataccacatagttaagagaaagcagagctgaaattagaacctaggtctggctgatttcaaagcccatgctatctccgttgcttccatcactactgtggaagtgaaaagcttcacttgtaagatgtgggctgtaatctaagaaaggctttgatatgtgaaagtaagcaataacaggacatcctgacaggtgagtatgtagaatcctgggggaaatttattcagagatctggacaaacagggctgtgttcagggatatcagcaaagtcgatcccaagggtggattcaagggctcaaggttacaaggccagactcagaacagagctggctcacacaccagggtaggtggctccaggttacccagaagcccgctagggtttttaaagcccctgttggcagagggaagaactaggttcagggtatggggtggcaccagctaatctgcaagtgggtctcaagtagatccagatgtggggaggaacagaggagaagcaagaaatcaggcaagtcctgacatcagcaacaactagtcgattgatgctttttttttttttagctttgcaacagtttccctgaaattgtgcagacagtcttaaacctgtcaattctggaggctcctgatttatatatgaacactgcactgtcattctccaagtgcaaaactacaaaatgcaatgtttctttctctttatagctatccattcttccatgaccttgagtttaatgacagctgcttctctagtttttccagttattagggaccttctccatgagcattagcaattctagaaattaggtaacactccctggcctatgacttgcacctgtgacccatgacagaggcagaattcatctattgcagagtcagcacatatggaaaaatagatgaagtcactgccttatccatgtccatggcagacattattaatcaatcacagcactctttgtaatttggcctagaaaatcttcacaattatgctccaaatctaatcaatggattagatttagcacatgataaaacttactgaccagtgaagcctagtggtttacctttcaataaatcactgaattaaaaataaagctaataatggcagttttaaattgactttctggttaattgtacaaataaatgcctaagtacattggaatctggacagaataagaaaagcaaaaacaaattttaaaaatcctcattatagaagaaggaataaggaactctgaattcttttattagctatctgacttaattcagctatgtgagcttctactatatgtcaagctgtattctaagaactttacatgttatctcatttaatactcataaaatattaaatagatattttcattgatttttttaaaaaataaagaatagaatattaaagaggctaaataactccataaagatcatgcaaggtcatcagagatagcaatgagatttaaatccagtccacctaattttgcaaccagtgcccttaacctctacattctatactgtctaaccagatatataaaggccaaaagaaaaagaaaaaagctaagttggcaaacaatgggcatgccctagattcagaatattcttaaggtgataggagttgctaagacagcagcagttctttcaaggcttcacatcagtctgcccccttggggaccaaagagaatcaggagccatggcagtgcaggacaatcatgctccacaatcccaatggattgggacatcggaaaatttccctttgggaaattctgttccagcagttaactaggacatgaaataaagactacgtgggcacatggcccatgattttctctgctctatcaggttgactgacttaacagaatctctcttctctctagaggcacatgcatagccccaacagatgcccttgccatgcaagggaggatgaactatgacagtcaatgtcaacccatcaattacaatgtagggatcaatcctaaaggtcttgtcattcctgaagtctgttgtagccaccacctctcatttccttggcttatgagtagttccaagggagacgggagcgcagctgggagctggaggaccccactcctgttcaaatagcaattaaacccctcaaatcttctcttgcagaaagaaaattgtggccactctagcatgagcttcctcaacttgtctccatctctgtttttctctattatcacttttttcttccttttttgtgctttcagaagagaagcatctccgtattgaccaatgctgctgctgctgcttctggtgctctcttctgcagtttccctgggacattgctccattgattctctcctccctatcttaaagagaagagagataacccaggcagtcaaaattttcctatagcctgtaaaacattctttcctttgagcctgctaccctgctattgcctgatctctttcttttctcactctccaccaacattcttgcaaaagtaatgtgcacccaccagcctctacttaatcaccaccactcactctattacccccagaatagcacatctgtcaccacaactccaagagaaatgacttctttttggtcaaccacatggatatttgtatcagattgtgcagagaagacttccgtttataaatgaaagaaactaagtcaccctattcaagactaaagggggaagggagtgtttgtttactgcttcacatgcccaaaccttgaaaagggcaggaatggacctggccagagaacatcatcaggatgctctgtgtgactgcccatctgtctctcatttctatcgttgtgtgccaacagggaaatggggccatagaccattctggtctcacgtttttcattgtgttccccagtttgttgggaaaatccaaagaaaggaatcaattggcctgccttgatttgtatagccacttcttgaaccatttactgtggccagaggaaagccatggcagttggatcagcctaggtcctgcgtctacaaggctagctagaaatgggcagcattctggtattagaagcagctggggaaccacatacatgcctgctggggaaatcataaactctacagccaccatgatttatgtctactaaacagacttatgtgtacagttgagtattgtgcagaataaaataatagatggtggaatggtggtcatcatcaaaatcacacagttatgaaggctgagcaaaactattaagatatatttgcaattctagccaaacatgtatttaagatcttatgtcaagtagacctaatgcatctatgggatctgagctctttgacctgaagggacatccagtagggccagatgtcccaaaatatgagctccacctgcctgctgcttttttgcctctggaaaccccttttagtttcaaattttcacaattcaagtgcaaacccctatgagagggctcctgtcatagttacaaattaacagccctggaaagagtagttcacagacaaatctgaacaaaaagaccctgcagcaacagaaccagaaaactcctgggaattttgggacagtggaaaaaggaagtggagctgcaggagcaacaagtctttcccagcttgaatttagcagacagtaatatcatatgtcaggagagtgctctgacattttctaaacattattatccccctcgaaagaagaaaacagtgaggctgagaaagatttgttaaggactcgtcttgtgtcaggtgaactaaatactgcccaggatttagctcaaccccattgtgcagatgagaaaactaaaactccaagaacctgaccacatttacacagctgcatagtggcaggtttggaattctcacacagatctatttacctggctccaaaagactgcagatggggcagtgaataaatacgataattggtttcagaaagtaggttttttgacttccaagttagtgctctttctgaggagtataccacctttcttatttaaaccataatgttgaacaaagcatttccacaagagcaatgtccttttttctctttacatctgcgaggcaggcaggaggtggatgattttccctactcaacagctaaagggaccaaggctctgatgataaacttagcccagtcaggatgtcattctaaacccagcagggctgggagccctgcaggcactttgcttttgctttctgtaatcaccttcccccgagttcagccaatcctggaaccagggccaggctggctgtgtttgagtgagctcatctctccacgttttttagcttcaattcctcataactgttttacattctgagccttgctcttattttcagtctttcatgaagaaaagttgttacattagaattgagtgactgtctgcctcgttcctcatctcgaattgtatttttacattatcaagtaaattaaaagccatacattacagaaactcatttaaaattctgtttagtgcatatttgcagaacttttgctgattcaatgaatgcctcacttaccaatcatgtgtaaatcagcgttttgctgtggggaatactttagggccggctgaactgacagcatccagttggtactttctcaagtttcaggttatctctagccctccacacctgagcctgggaataagggggagctgagcccaggaaggcagtgtgacttctggggcatgtgcccacgacttcacacctcaagaagaagggggagatggcgcattctcggtagtggcagcatctctggcagaatcatcactattatagtaacactaccaatagccaaaactggcttcctgggcacactacctgtgcagtcatgaaaagcacagtgatgaaagggccccgtgcttagtttaattatctgctattgccaaatgaaatgcttgatcattttttagcaaaagtctctcattttcatttttgcagtacacatcacacagtcaattttgttgacagctgtcacttagtgaagatttttctctaagttagaccttgagcttctcttgcatcatctaatttaatacttacaatattcagttattcaacaaatattgagccactcattaggtaccaagcactgtgctaagccccagggatgctagaataaacaagacaggcgtggtctctaccttcatggaacttacattcaaacagtataatcaaaaataaatcaaaattgtaataactgttctcaaggaaaaaacaataataaaagaccaaggtaaatatattagaaagggttcatttaaaataaagtgacaaggaagggcatttctgagagcctaagaggtaacaattcttgtacccattttacagataaagaaactgaatctcagataggttaggtgacttagccaaagtcatagagccagataatggcactggcaagctctgaaatcaagtctttctgacccaggggccagtgtgttataaaaaatcttttcaaacttcaaataatagtaatcactggggattgtattaaactatagattctgattcttggatggtgctgatattgctgggcccagaaccccactctgagtacaaggccctaatccctgtgttagtggacatggttgggtggctgcagacagaactccagggcactaagccctggaaaggtggttcttgccatcagaagtggtagggctcagtaccagaggggcagagtgggaactcaagggctgcaactcctggaagatttcatgaatttgcaaaaaccctggggaaaagaatgcaaagatcatcctaacagttctgaccaagaactttgaagagggctcacctacaagagaaggagttttgcccccactctacagatccaaaagcctaggtatatcaccttgagtgctaagaaatgtttctttcttatgtccaactacaatctctcttattgtatcttaagctcattttcttttgcaaatttctttaggaagaaagaacacaagcagttagcatttccacatattgaagttagtttcaagtcatctcttatgtttctaagtccaaatctaaatacctcattgcattttatttttgtctttataggagtatgggagtcattttttaaaatctctacaataatcttttttctgattcttctgcagtttttatgagccaaatatgacattatgagatctgactaattcatagcaaaaataaccacttcccagccctcataaaacacacttcttttttccccacaatgtattaaacttatggtcaactatgaatgccaggtctctttctactgtttatgtatatgttgagtctctgttctctgtgtttgtcttttttgttaagtactgaaacaatggcaattgacacagtagctggcgcgtagtagatgattaataaatatcagtgaaataaacgtataaataatcttgaactagtttttgctgaattataacctgtttttaaagtgtatttctgtgctcaaatcattaggaacctccctgaagggggaagtgacctcacttagagcaaagacatgagtgtagaattgcctggaggcatctaataaatatttttcatgagtgatggttgaccaaagaaagagcagagtctgtaattttcgagatgatatagagaaaagaaggactaagaaagactattggactgggaatcaaccagcaaaacttctagcattcgccataccccaaattagctgtgtgaccttgaggaattcattagacttctctgggctacaggtatcctagccaagatacaatgggtggaatgagatgatcgatctctaagtttctctttagcactaacaatctgtggatccatatgaacacttgtatcagggtttagaaaatagaaaccagttgccaaaagacaaagatttgtttagaaatgcaagttatctgtcagaggatccttggacaaaaacagctcttgctttctcctttggagtcatattttccacccttgtggcttattgcaatggtctttaatgcatgcagttttctctgtgacccctttcagtttgtcatgcctagctagatttgtgtggtgcctcatcacaccatttggctctgcgtctgcccgtgtttggttgcaaagttcacagtactcctcgtggtgtgcttgatttgccctcgaaactcccattgactttgtgtactcattgcctgatcaggcccatttaatctgcacaactattcaacacaaagatggataattaaacattctatggatttcagtctcattctccaagatgtaaggggtttcctggcagtactgtctgcctgaatcccttggagcttcctgagagctctcccttcataacctacagataaatcactcttcttccccagaaacacagccactttctcttttctaagggcatctacttcatttgtacctgggccatggttaggatatttcaggtaatttcagctccaggagggcagcactgcaatatcagttggcctccatttacctctgttccttcctgcctgccctctactgagggcctatttttgccagaaaattttgtttttgtttgtttccaatccaatacacaagcttcccacaggtacctaatgtgccatctgcattttagcaaatattatctcctcattcagcctgaatcaagggcttttctcttacatctggaatttgtaggtatgctgtgtgcattggcagagctaaccatgagtggaaacaaaacagcatctgtgaaatgggataatatagggacagaggccaaggaactttgaagtaagcaaaagagaaaactccagctgtgtttaagggaaagttaatcaaagcaacatgtgttgtgtattttagacctactatgtgcctagcaatgtgctgaatgcttttaattatgccaactactcatctcaatgtctccatatagtattagtttcaacttagaagaagtaaggctaggagagaaaaaaataactttctcaaagtcaagcaactaataagtgggttcaaatctaggctttcttttttttaatttgtgtaactgtattgggtagaactgtaattttgttacatacatagattgtatagtagtgaagtcagtgcttttagggtatccatcactcaaataacatacatcatcattaagtaatctctcatcattcatcgccctcacatcctctcacctttctgaatctctgttgtccattccacagtctatgtccatgtagacatattatttagctctcatttgtaagtgagcacatgcagtagttgttcttctgtgtctgagtggtttcccttaagataatgaccttcagttccatccatgtcgctgcacaagacatgattttaattttctatggctgaatagtattccattgtgcatatgtaacacatattctttatccagtctttcatttatgggcacttaggctgatttttgctgttgtcaatagtgctgtgatcaatttatgggtgcaggtatcttttttatataatgatttcttttcctttcaaacctaggacttcttaactttaaaatttatgttcttttccttttttatcaaaccgctatgagagggaagagtaaatgtgaggacaagtgcaggagaggagagggagatacaggaaaggaaaggatgtaggtacattcacagctgcctcaagtggcactcagagtgtgtcatccatgccagtgatctgtcatcaataccagaaactacatacactttacaatttggttccagcacaacaaaagtcaatacatataactctcttctgaatctttcatcatcaggcttcttactggggaattctccaagtgtgcacaagtgtccacatatccccatgacctactttgtagttcatgtttggggtgcaggccacccattcttagtttctagcctttcccacccatgtatacgcactgtgatctctgactgtaagcgagcatgctaaaaatgtagtagcctacaacaacatcatcactttgttattacctctcatggttctgagggataactgggcttagctggatggttcttgctcagggtctctcatgtggctgcaaccagacagtgacctatactgaagacatctcgaaggcttcttcatttgcatgtgtggtggttggttctgtcatttaatggctcatttgtgtcctctccatgtgactggagctttctcacagcacaaggctgggttctaagagaagcagcttgacagatcctctggaagctgggtcaacttttaggccttggatgtctcacagtatcactttgccatacccatagctctgtctagattcaaggagagggaacatagacctcacttcttgatgaaaggagcgtcactgtcacatagtaagaggagtgtgtgcaatggatcttatgatgaccatcttggaaactctattttgccagaatcctcccattttatttctctcccatatgtgacatatactcatcttttctcccaagaccaccgtatcccataccattacagcatcatctcaaagtcaggatctcatgcactaagtaagatatgctgtgggtgaagctccttggattcctctccttgactaccgtttctgtatctgaagatgtatgaactaaagagacaagttatctgcctcctaaagacatcactttttaaacattcactctgtattgggccctgaatctggcatttagatgagttacttatcaacagtcctgagaagtaagtaatattatccctaattccaggcatatcaaagtaagtacccaagaacttgtagctactgagagtctttagctccccaatgaggctagatgaacacacattatgcaagacaaattataaataccttaccatgcagttaacttatattcagtagtattcatttatattcagtagtaattctgaaagtgtccatagaccacaaggagtccctgaaatattttcaggaaactcaagaggttaaaatggttttcataataatattaagactttacatgcctttttcacttgacatttgcactgatggtgcaaaagcatgagagttaaaaggaaccaggccttctcaaagaaatagctgagccagggactggagcaaagtcagtacaaagatgagccagcaacaatttattaggccagaaagtgagaaagtattcaaggaaaaaaaataatgattgggacacatcacagacataggatacagcttggaaggctcctcctggccagatctgggacaattttaggacaaaaataagtaagttctgggaaataatataaacaattgaaaaaaacacaaattcatgagtttaggccaataaaagatagctaaatagatgatagaaagatcataggagaagaacagagggctcttgcttacagtagaatgctaaggctaattggcacacatggaggggatgctgaaactggagaatcatcattttgcaatctccatagttgcaatctccaaagattggatcaggcaagaaccatcattggatgctaaatctagaagaagatttttatgagaagctgaatttgcatggtcttgaaggatctcaccacacactacttattgtggtaaaagagaaaaataaaataaatttaaaattaaaagagtggaaaattaaagactggaaaactcgaaccatgccttgaataatgataacagttaatgttactaatgaaaggcatatggtgatcgtgtgacttcacatgtggcttctgagaaagacactcatgcagtattctggcataggatgcataatgtgaacctaatcacaatgcaccatcagaaaaacacaaaatgaaggatgctctgtttttttctttttataagtggatacatggaggaaggtggcctctactcttaaaaaagtgtcataaaaaaaaggttgtggaaatgtttcagataaaaggaggctgaaaagacaagagaactaaatgcaatactacctgatactggatcttgtacctgtaaattatcacattaggtcaacagacaatactggaatacagacaataaaaatgttatcaatgtaactttataaagttgataactctactgtggttattgaagagaaaattcctcctcttagcaaacaaatattgaaatatttaagggtaaatagccatgatgtatgtaacttaacttcatgattcaggggaagaaaagaggtggggaaagagggtaagtgataaggcaaatggggaaaaattttaaactggtaaatcaaaataaagagtatctgggtgttccttgaattatttttatttttgaaaatttttaagttaaatatgtctccaaacagaaaatttaaaataacaaaagcaatggtggagcaaagcactggtgttttgaacaaattgaggcagtgcccccaaatggtagtaggtgttgtggtgtgttcttcaccaccacatactcacaatttaaaaaagaaagaagaaagaaagagagaaagaaagaaagaaagaaaggaaggaaggaaggaaggaaggaaggatggaaggaaggaaggaaggaaggaaggaaggaaagaaagaaagaaagaaagaaagaaagaaagaaagaaagaaagaaaggaaagaagaaagaaaggaaggaaggagaaagaaagaaagaaagaaagaaaaagaaagaaagaaagaaagaaagaaagaaagaaagaaagaagaatctggtttaatgtttaaatgttatggatgaaataataagaattattaactttattgtgctctgtgccctgagtacacgtcattttaatattgggaagactcaaatattgggaaatgggaagtatacataaagcactcctgctgtgtgctgaagtgtgatgttgtctcaaggaaacgcaggaaggtgtgcacgtgcttgagggctgagctgcagtcgctgcttctgtccatggaattccattttgagttgaaaggacaattggcaggcaaactacagttattcagacaaatgatggttatcaagcagacactctctcaaatatgaaggaaatgagcctgtcacttcaaggaaaacaactgacaagattttttgctaataataaactttgaggaggtttcatgtgataattagaaaacttagtatctgacactatgacacttgacagcttcccaatatttaaatatgtttctgatgagactggtagtgatattaagtactatgattttgtatattgtaaatgaaatgggtcaatatttggaagatctgcattactcagtgaaccagtattttctgaatgatcaacgcatgatgatacaaaattgtgcctgggcaagcctcattcaaagtgtaagaaatactaatggattttaatgtaactgagtataaaaagtttattaataaggtttcacagttttaagaaactactacttattgagttttggtatagtatcaagaaagaatctccataattatctgaaaggctattaaaatactccttcccttttctaccacacatctgtgtgaggcaagctttttttcgtatactttaaccaaaataaaatatcacagcaaagtaaatccaaaagcagatatgagaatttctatgttttctattaagccagacattaagagatttgcaaaaacagaaaacaacttttgctcttctcactaatgttttttattttggaaaatacagtaattttcgtttttaaaatatatcatttatgttcatatgaatgagtatactgttgttacttatagatgaattaataaataaatatatttaaaatgttaatttttaatatctaacatggaatctacaaaaaaaaaagctctttgggatcctcaataattaagagtataaaggggtcctgacatcattttgtgttcttaatggaaagggtggtaaactcaggtgcctgtgctcctattatggcagctgaagccgtactgggatgctgcctctacaggtgcttgcgttaaccacacagtacagtcaagggcaggcatgtgacctaagcttggccaattggactttttcttctggcattttagttattgaatgaaatgaaactacagtagaagatatagtgtatgttcattcattctagtttttgagaccatatggaggttcctcgtttctctctgttacaagcccagtttcttcagttttcctgtcattctagcaggacaatacatctctccacactcatcaccccccgcatctccatattttagccaccataggattctgttgcctgctaccaaaaaatcttaataatacattaaatctcttactttaccctggaaatgacttctccttgaatttccttcatgctgcaattctgctctttaccttgagtgtctcatgtcctgattcggaaagctttttgctcctgcctgtgggtgacacccaagagttatagcctactcattctagtcaatccattaatagctggaattcaggcttaaaacaactcacattggtaagaaacatggcttctaagacaatttttgtttctcatgaataaatttcactttgtctagaggagcccaggaaatttcctgtttagccaattaaagcccattttgtttgtttgtttttaagtaggtgaagatatttagagatctaataggccctgtagaaataatttattatgtttttttgtcgtggttattgttatatgataaatgaagaatcaaagggacctcctggtgataaaaatgccagatttggaatcagaaaaccagaattacagctgtaaccttttttaaaaaatgtattttctgcttatgtatatagctatacctttttttttttttttgaaatggagcctggctctgttgcccaggctggactgcagtggtacaatcttggctcactgcaagctccgcctcccgggttcatgccgttctcctgcctcagcctcccgagtagctgggactacgggctcctgccaccacgcccagctatttttttttgtatttttagtagaggcagggtttcattgtgtgttagccaggatggtcttgatctcctgacctcatgatctgcccgcctcagcctcccaagtatatagctataactttttaactcacctaaaggtatgtccttgagcaaggactagatgatctcatcaggcccttccaattctagagttatgtaatttaaagttcagcaaagcttcaccaactatcacttcctactctatccctccctagacaagaattgacgcctacctttcctgagcagtgctgttggcaggtaatagcacaggctctggatgcaagtagacaagtgcccaaacctgggctaagtgacctcacctcatctgaaaaatgggaatgatgatattaaggtattgttttgtggattaatgaggtaatgtgcataacacatttagcacaaagcctgtaatagaacaaatgcttggtgaaagcaagccacaatgctattatagctatagctgaacacacttttcacagattatagtcatcccgccactaaatacattttgcagacagcttgctatttcttcttctgtaattctaaatgtgttttacctacaactcagtaggagttaggctaaatttatcgctttgcatggaatcagcaaaaactgtaatagggtatactgtcagtgagtaatggcatatatttgtaaaggatcagtgtttcctgcaaaggagaggaaggattcagcaccccatctagaagagctcctttgctgctgaaattgaatctgtatgctgctcttcagtgtattactttactgtgaggtgactcaggagataagacaacagagcattgtgggcaaatagatcacattcagaagaagctgcctcttagcacttgtttttcttgtgccctgctatatcccttttatggcctgaattgtgtttacccaaaactcatatgttaaaggtctttaggatgattccctaatccaatatgatgtccctgggagaagaagaaatctggacacagacgtacatgagcagagggaaggccatgtaaaaacacagaaaaaaagatggtcatcagaagccaaggagagaggcctcagaataaaccaaccctgctgacacctggattttggacttccactctctagagctgtgagaaaataaatttctgttgtttaagccacccagtctgtgctgttttttatggcagcttgggcaaactaatacaatctccaaggcctaaaaaagtgtctggcacacagtaggtattcaataaatacttgttggatgactacaagaagaaatggagcagttggcagctgacacccagttttaatgaaagcaagtctcagttcacacagtacaaaataagtcatttactgacaggtggctgaaaacagtcacacaagcatgtctggaaactcagaggactctgagttctctgtcctttttgaaactcagaagatgctttggacaaaaggtcagtggggcaaaggcaaaaatatgccagcagcagaatttgcctaacatccattggactgaggactagggccatttaggaatcaagaattaaaaaaaaaaaaaaaaaaaaaagaagcagctgctgcttctcacctctgaagcagaagatgcaaattatatagctatgtcactgagtcctggctaacagagaaacctctcaacctgtttagaagaatccacggccattagtggaaatattagtacatcagagaggttaactttgatgatccccaagcagcacttgtaaaattccatagtttacaaacttctccattccttttcatttttctctgaggttattgtggtaaagcaatctgcttaaggtctcaaattagtcagtggctgtatcaattaagctgatttcagagacaagtaacaattcaacagctgtaaacaattaggaaatttactgattcacataactgcaagtccaggagtggtatgtaattcaagattttttaatctagaagctccatagtgtgctccagagttcagattccctctgacattcacagttttagtattgccctaaaaacagctcccttaatggtcatagaatggaggctttttctttcacactcagtagatgagatggtttggctgcatcctcacccaaatctcatcttgaattgtagctcccataattcccatgtgttgtgggagggacccagtgggaaataattgaatcatgggggtgggtctttcacatgctgttctcatgatagtgagtaagtctcatgagatctgacggttttataaaggggagttcccctgcacaggctctcttgcctgctgccatgtaagacgtgacttttcttctccttcaccctccaccatgatcgtgaggcctctctccagccatgtgaaactgtgagtccattaaacctctttcctttataaattacccagtctcgggtatgtctttattagcagtgtgagaatagactaatacagtagacaaagagaatcacttaaagaagttgtacctgaagggtgagcaagaactttctcagaatccctcagtcagatcccttcttatttgtcagtggtccaatttggattcacatgtccatcaaggaaccaatcattgccaaagcagggagaagattgtcttaagtcaatcaggcacactcctgaacaacaaaaaaaatatggctcccttaaggaggaaggcaaaacatatgtgagataggaaatcagcattgtctaccatggtggttcaactgaaacatgagccaggtccttcctgtctaccatgtcatttcttatctgaaaaatctttacaacttacaagtaattgacaaaatggttaatcacgttgttaaatagctgttttcctcgcaaaaggacagtaagttttctttaaatagtgaagttcttactagtaattaaaagaggctacaatattgaaggttctgattttcctatgatttcgataataagttactaacattaagccatgtcctcctgtgtgaaaatcatcccctccctcgttccaactttcaggacattaaatgtaactgggactactccaggaacactaaaagccactgctttattacaaacggtattttgctgctcattaaagtaggtacatcacacttaatgaaagctcagtaagttataagcaagcattctcaagagtaagtcatcatgactgccaacctggtgctttcagctgtggagcatcccctagggactaggtggagaagtgccggggaagctggagctcctacctacagatgtcttggcactggaggctgctttctttgagcctagccttccaggcaattgatcctgatcctttggctcagagaatcattatcgtttttagctttgcagcaggagaccaatagagacaaatgaagaaattagaaccatactcaggcttcaccaaatcttatggcagagcccagaaaagcccactgggattgctccatagagacaccacagcacttaagcactgacagtatcaggttagactagaaagcgtgggcttccacagggcagaggaaaatggcccaggaagaaggggtgaagcctccctcaaagacaaagcgtgctataagggatcccaaatccaatcaagaacctaaatcccaactccatcctcaatgcagtttctccccctcaattcttttattttgttaatgtcttcatcatctgtcagatactcaagcttgaagcttcacggttacatgtgacttcttctcccttatcccccatttctgatcagctgtcaagagctgtcagttctatctcctttactccttttctttctgcctcttcctctccattctatttgctgtcagcctaattcagaccctcattaactcttgttggattattaacatggcttcatcactggcctattcatctcctgcccctatgctgtccaaccactctattaattgctgaattgattttctttttttttttttttgagatggagtctcgctctgtcgcccaggctggagtgcagtggtgctaactcggctcactgcaagctcgcctcccgggttcatgccattctcctgcctcagcctcccgagtagctgggactacaggcgctcgccaccatgccccactaattttttgtatttttagtagaaacggggtttcactgttttagcctggatggtctcgatctcctgaccttgtgatctgcctgcctcggcctcccaaagtgcagggattacaaggcatgagccactgcgcccggcccgctgaattgattttcataaagcacagctccaattctgtcacttccctgcttactgaaaaactttaaaagtccactttccctacaaaaacacatcacaatccctgtcttagatttaagaacttttgtgttctgatttccccagccttatcttctaactctcccctgaatattctcattctcacaagacttctcaaaattccccatatataccccacgtttccctctctgattcctatccaagagttactctgtacctggaatccctcaaatctccatttccacctaccatttatcctcttagatccagctgttatgttatggccttggaggacatattcaccagttgtgatctatccatcttctgaaaatccagtaagtattacctttctgctgttgcacaaacatctctatttttcaattataaaccatagctttcccactgtattcaactcattttatccattaattatacaaatatttattgagtggggtattattactgctacaggcactagagacatcataatggatgtacaaaacagaccaaaacccccactatcttagagcttacattttattagaggagaaaacaataagattaagaagaaaaatctgtaatatattaggtagtggtgagtacaatagagaaaagaaaaatctgagaaagggaaaggaagtgttagctcaaggggtttgacattttagatgcagtggtcaggaaagcactcattgaaaagatgacttgaagtgaaattctgaaagaagtgagagagccaaccatgcagatatcttgaggtaagagtactcaaggcaagggaaacagaaaatgtgaaggctttggagcagaagcttgcctggtgtgctcaaagaacaggaatgggacctgcatggaatgaacataacagagtgtccctggatgtaaagattgtaattaaagacaatgatggacatagagtagaatatccccaaaagcagacataaaatagtatctattgaaatattgaacattttaaatatatttctgtgcttttatgttgatatggtttgggtttatgtccctgcccatatcccatttcaaattgtaatccccaatgttggacaagaggactggtgggaggtgattggatcatggaggacaaatttcccccttgctgttcttgtgatagtgggtgcgttctcataagatctggttgtttaaaagtgtgtagcacctcccccttctctctcttccttctgctccagacatataggacatgcctgcttcccttgcaccttctgccatgattgtgagtttcctgaggcctcctcagccatgcttcctgtgcacactgaggaaccacaagccaattaaacctcttttctttataaattatgcaatctcaggtagttctttatatcagtgcaagaatgaactaacacagaaaagtggtaccaagagtagggtacctgaaaatgtggaagaaactttggaactgggtaatgggcagaggttggaagagtgtggagggctcagaagaagacaggaggatgagggaaggtttggaacttcctggagacttgttaaattgttgtggccaaaatgctgatagcgatatggacaatgaagtccaggctgatgaggtctcagatggaggtgaggaactcattgagaactagagcaaaggtcacttttgttaagcattagcaaagagatttcagccgttatgcccatgccctagagatctgtggaattttgaacttgagagagatgacttagggtatctggtgggagaaatttctaagcagcaaagtgttcaagacatggcctggctgcttctaacagtgtatgcttatatgtgtgagaaaagagatgatctaaaactggacttatatttaaatggaaagtagaacatgaaagtttggaaaatttgcagcccagccatatggtagaatattaaaaacccattttctggcgaggaattcaagctggctgcagaaatttgcacaagcaaagaggagccaaatgttaatagccaagataatggggaaaattccttgaaaattacaaagaccttcactgcaggccctcccatcacaggcctggaggcctagtagggaagaatggttctgtgggccaggccctgctgccctgctgccctgcacaacctagggacactgatccctgcaacccagccactccagctccagccatagataaaagggcctaagatacaccttaggccattgctccagatggtgctagttgtaagccttggtggcttccacatggtgtttagcctgcaggtgcacagagggcaagagttcaggtttgggagcctctgcctagatttcagaggaatgtatggaaatgcctggatgtccaggcagaagtctgctgcaggggtggagtcctcatgaagaccctctattatggcagtgcagaggggaaatgtggggttggagcccccacatggtgtccccactggggcactgcctagtagagctttgagaagagggccaccatcctccagaccccagagtggtatatccactgacagctttgcaccatggaaaagttttaggcactcaatgccagcccttgaggtcagccatgggagctgagccctgcaaagccacaatggtggagctgcacaagacattggtaggccaccccttgcaacagtgtggcctggatgtgagatatggagtcaaaggagattattttggaattttaagatttaatggctgccctgctgggtttcaaacttgtgtggggcctgtagcccttttgttttggctgatttctccctttcagaatggcagtatttagccagtgcctatactctcattgtatcttgaaagtaattaacttgtttttttttttttattttacaggctcattggcagaagggacttgccttatctgagattagactttggattatggacttttgagttaatgctgaaattagttaaaggacatgagatctggaaggatacagggcagaatgatatgatttggatttgtgtccctccccaatctcatgtcaaattctaattcccagtgttagacaaggggccttgtgggaggtgattggatcataggggtagacctcccatttgcagttctcaggatagtgagtgagttctcatgagatctagttgtttaaaagtgcgtagcacctcccccttctttctcttcctcctgctccagaaacgtaggatgttcctgcttccccttcaacttctgccatgattgtaagtttcctgaagcctcgccagccatgcttcctgtacaacttgaggaactgttagccaattaaacctctgttctttagaaattagccagtctcaggtagttctttctaacaatgcaagaatggactaatacacatggttacaaacagagtcattttttttctacttaagaattctcattccttcttttcatgcaggcttactagaaattgactttcacagtgtttgtttgaaaatgtctttatttcatcttcacttgtgaaagataatttttcagggtaaagcattctatgttggcatcattttgctttcagaaatgtaaatattctttccattgttttttgtcttctatgtttcctgttttcctgttcagaaatcaactatctaattagagcaaagtttatagtttgatccttttgggcttggttgtttttcaaattttcttttccttggttttcagcaggcttattttgaagcatctcaatgtgcttttcttgcatttgttttgcttggaattcatatggatttgtgtatgtatggtttgatatcattaatcaatttggggaaattctcaatgattttctattcatatattgtttgtccattttttttcttttaaaactataaatctacatatgtttggtacttttattgcctcataaattgtttatgcccactctttctttctttctctttctttccttctttctctttctttcttgccttctttttcttttctctttctctttcttttctttttctttctctctctctcttccttccttcatctttgctttcttccttccttctttctttcctttcctcttttctccttctttcctttctatcttttttgtttatttctctctatgcttaatctggacttttctactttagattttccagtttagtaataacctcttcagctatgttcaatctgttacagtttccatttaattctttgttttttaaatagatctcagatttggtgaaagttcccatattgtcatctatttcctttaacatattaatcacagttactttaaagcttatgtctgactaactccaattttgtatcacctgtagttttgttcctatgatttatttttctctttgtcttatttttgatagaaattatactttttgattgaatgctggatattatatatgaaaaactataagcacttccattcatgttattttcctccagagaagattcactcaatcatatatggcagatagcgaaaataggacatgtctccattaactattgctgcgtaacaacattacccagagttaattgcattaaaaaaaaatcataatcccagcactttgggaggccgaggcaggaggatcacttgaacccaggagttcaagaccagcctgggcaatgtagtgaaaccccatctctacaaaacatgcaaatattagctgggagtggtggcgtatgcctgtagttccagctacttcgggggctgaagtgagaggatcacttgagtccaggctgtcaaggctgcagtgagccaagattgtgccactgcactccagcctgggcaacaagagtgaaactctgtctcaaaaacaaaacaaaactaagcacttatcaagcttgtgattctgtgggttaggaattcaggcaggatccagcagggatacctcagctctgctccatgttgtctatagtcacagctggggtgattcaaatggctgaagacaattgggacaacttaaataaagccctatgtatggagcctctgtttttgtccacatggtgtctcctgtggagctagctcctttactcacatatttattccctgggctgggatggctggaacagatgagagttggctagactcactttcaacacattgtggtcttaaggtagtatgacttcttcatgacaagtggcttcccacagagtgggcatgtcagtagagaactttccaaaaggcctaagtgaaagcagcaacgcttcttatagtcttagtctcagaaatcacacaaggtcactttcagggcatatttatacatatggcagattcggggaatgaacatcaaaagaggaaaaaacatagtgaagtagatcatgtcattctaattaacaaattcaaggtggcatttcagactttgaaagtttaggcaatttctgtttgcctccagtcctagagttagcccttcaggggtcacgactgagtccaaggtacttagaacttttcttcctttgtggctgttagattaccatttgtgtctccttactactggaaagctgatgaaactccttttgacttttatcctatgacttttactcaaaatctaggacattttcccttctctccaaaatcttcttcccagaatcttgatttctcaagtcatgtctgcttttgttgtcacaaatctaatttttatctcttcagcatcatgagattcccaagggctctgctggattctctgtctcttgtgtcatttctctgttcagcttctcagccactcatctaacaaagcttatcaataggcaaataccccatggataaattaggggacagaacattgtgcttgcctcattaagttcccttttcctctcaatacgtgcctcaagttctgcataccttgaaagcttccccacttatacaaacatattttttgtgcctttctaattgttcttgacagtaggtttggtctactacaagtgacaccaccatcatcagaagtagaagtccatagccttttatttgaatgattttcactggctcaccactcacaatagctcatgtactgtttctgattatcatattctctaactttgtgacgtattttcaccatatggaatcttcttgtttttttttacccagctttcatggggatgatgatatccctgatcccccaggaccataatgtcccttgtccttgatgcagacactgtctatatttcttttagattcccccaaataaatacccactcagaagatatctagtcacaagcctttggttaaactagagctagaccttttttttttttttttttttttttctgagacagagtcttgctctgtcgcccaggctggagtgcagtagctcaatctcagctcactgcaaactccatctcccggactgttcaagcaattccctgcctcagcctccccagtagcttggcaccacgcccagctaatttttgtatttttagtacagactaggattccccatcttggccaggatgatcttgaacttctgacctcgcaatccacccgcctgggattacaggcgtgagccactgctgggattacacgcatgagccactgcgcccggccaagctagactttaatagcttaccctagtctatacagcagaaccagggtataagccacatcatgtctttcacatcccacttatggtagaataatatactgaaacatgttccagacctatttacaaagctgttgtgtgttctcatactctgattcataatgtattacatgactttaaggttgctgctttgcatacccattaccaaaatagaaaaaatctaacttaataataataaatcggtttttaaaaaataccatctatactcattccttcttccctccagagtacagtaatttttacagcaggctgctaaatatatcaagggataaaccaccactcatctggtggtataaagaagaaagtgaatattaaaaacaaaaatggcaaaaagggcctcagcttcctgcttcacctgttagttttctttcctgagcactgagcttgccaagattgatgtcagatgcagcctcaaactcccctgcattaacagaaagcattaggttctcaggtgagaaagtttttctttagtgacaactcttgcagacaaatccagttaatatgcctgtgtgtgcatgtgcacatgcacacatattcatgtatactaacagcttgatagatgagaaatggctttctgatgatttttaaatcaatttttatagtttaagggctttttttccagaagaggagaaaactttatttaggtagtcaagtgtttgaacttgctgacaggcacttcgcaaataatttttgagtgaataaatgaatgtgaataattgaatgactagtggactcttgcattccttcttcaataaaaaccaaaagcaaagcaaagcaaaacacaacaaacaaacacagaaatccagttctcctaagactagcacaaaaggagatctgctacttggggagcatgataaggtagactatccattttaactttctgctctagatttctcacagcacaggaaaaacaagggcctgtatgttaaaaagttattttactaaagttgggggataacaaaaagaaaaacaaaagaagcatgagatcatctattctgtttggcaagacacaatgttctctgtgttcaaaaattgagttcttaagaatcacaataaaatgatacaggagctgacagataaaatagcctgtataaaaaagaacctaacaaaactgacagaactgaaaaacacactacaagaatttcacaatgcaatcacaggtattaacagtagaacagaccaagctgaagaaagaatcttggaacttgaagactgactctaaaataagggagtcagaaaaaaataaagaaaaaagaatggaaaggaatgaacaaaacttcaagaaatatgggattatataaaaatgtcaaatcaacaaatcactggaatccctgaaaggaacagggaaaaaccaaacaacctggaaaatatatttcagtatatcatctgtgaaaacttccccaacctcactggagtggccaacagtcaaattcaggaaatccagagaacccctgcaacattctatacaagaagatcatccccaagacacaaattcatcagattttccaaggtcaaaatgaaagaaaggatgttaaaggtaaccagagagaatgcacagtggtcacctacaaacagaatcccatcaggctaagagcagacctctcagcagggaccctacaagccagaagagatgggggatctatattcaacattcaagaaaaaaaaatctttaaccaagaatttcatatctagccaaactaagcttccttagcaaaggtggaataagattcttttcagataagcaaatgctgggggagttcattaaccccacacccaccttacaagagatcttgaaaggagcactaaatatggaaaggaaagatcattaacagccaatacaaaaacacatttaagtatacagagcagtgatactataaagcaaccacacagtaataaccagctaacaacacaatgacagtataaaattctcacatatcaatgctaactttgcaaatatgttaaatgccccattaaaaagacataaagtggcaagctggataaagaagcaagattgaatggtatgctgtcttcaagagatccatcttacaagcaatgacagccataggctcaaaataaatggatgaaggaaaatctaccaagcaaatggaaatcagaaaaagcaagggttgcaatcttaatttcagacaaaacagactttaaaccaacaaaggtcaaaaaagacaaggccattacataatggaaaaggttcaattcaatgaaaagaactaactatcctaaacatatatgcaaccaccaaggagcacacagattcataaagcaagttcttaaagacctacaaagagacttagactcccacacaataatagtgagagaattcaaccctccactgacagtattagacaatgttaagcagatcatcaaggcagaaaattaataaagatattctggacctgacatcaacattggatcaaatgtatctgatagatgtctaccaaactctccatgccaaaacaacaaaatatacattcttctcatcaccacatggcacataccctaaaactgaccacacaatcaaacataaaacaatcctcagcaaatgcaaaagaattgaaattatactaagcacactctcagactacagcacaatgaaaatagaagttaagtcttaaaaaaatcactcagaaccatgcaattacatggaaattaaacaacctgctccagaataacttttgggtcgataatgaaattaaggcagaaatcaagaagttctttgaaactaccgagaataaagatacaacataccaaaatctccagaacacagttaaggcagtgttaagagggaaatgtatagcactaaatggctccatcaaaaagttagaaaaagctcaaattaatgacctaatatcacgactaaaagaactagagaagcaagatcaaaccaactccaaagctagcagagcacaagaaaccaccaaaatccacgctgaactgaaggagattgagacacaaaaaaccattcaaaagatcaatgaatccaggatttaattttttgcaaaaaaaaaaaaaaaaaaaagataggccactagctacactaataaagaagaaaagagggaagatccaagtaaactcagttagaaaaggccaagagcatgttaccactgaccccacagaaatacaaacaaccatcagagacaactacaaacacctctatacacacaaactattaatagaaaacctagaagagatagataaattcctggacacgtacaccctcccaaaactgaatcagggaggaattggttccctgaacaggccaataatgagctctgaaattgaatcaataatgaatatcttaccaatcaaaaagagcccagagtcagaaggattcacagctgaattctaccagatgtacaaagaaaagctgttatcattcctactgaaactcttccaaaagaattgaggaagaaggactcctcccctacccattctacgaggccagcatcatcctgataccaaaacctggcagagacacaacaaaaaaataaaacttcaggccaatacaatatccttgatgaacactgatgcaaaactcctcaagaaaatcttgtaaaccaaatccagcagcacctcaaaaagctaacccatcacaatcaagtaggttttattcctgggatgcaaggttggttcaacacacacatatcaataaatgtgattcatcacataaacagaacaaaagacaaaaaacacatgattatctcaatagatgcagaaaagtcttttgataacattcaacatccctttatgttaaaaactcaatagattgggtactaaaggaacatacctcaaaataataagagccatctatgacaaatccaggctgggcacagtggctcatgcctgtaatcccaacacttcgggaggtcaaggcaggcagatcacttgaagagtttgagatcggtatagccaacatggtgaaacccaatctatactgaaaatacaaaaattagccaggtgtgccctctccctctccctctccctctccaggtgtgccctctccctttccctctccctctccctctcccctttgcacggtctccctctgatgccaagccaaggctggactgcactgccgccatctcagctcactgcaacctccctgcctgattctcctgcctcagcctgcccagtgcctgggactgcaggcgcgcgccgccacgcctgactggtttttgtattttttggtgaagacagggtttcgccgtgttggccaggctggtctccagctcctgaccacgagtgatctgcctcgggctcccaaggtgctgggactgcagacggagtctcgctcactcagtgctcaatgttgcccaggctggagtgcagtggcgtgatctcggctcgctacaacctccacctcccagccgcctgccttggcctcccaaagtgccgagattgcagcctcttcccggccgtcatcctgtctaggaagtgatgagcgtctctgcccggctgcccatcgtctgggatgtggggagcgcctctgccccgctgccccatctgggatgtgaggagcgcctctgcccggccgcgaccccgtctgggaactgaggagtgcctctgcccggcggcgaccctgtctgggaactgaggagtgtctctgccccgccgccacccggtctgggaggtgaggagcgtctctgaccagccgccccgtctgagaagtgaggagcccctccgcccggcagccacccagtctgagaagtgaggagcccctctgccccgcagccgcccggcctgggaagtgaggagcgtctccgcccagcagccgccccgtccgggaggtgtacccaacagctcattgagaacgggccatgatgacgatggtggttttgtcgaatagaaaggggggaaatgtggggaaaagaaagagagatcggactgttactgtgtctgtgtggaaagaagtagacataggagactccattttgttctgtactaagaaaaattcttttgccttgggatgctgttaatctataaccttgcccccaaccctgtgctctctgaaacatgtgctgtgtccactaagggttaaatggattaagggcggtgcaagatgtgctttgttaaacagaggcttgaaggcaccatgctcgttaagagtcatcaccactccctaatctcaagtacccagggacacaaacactgcggaaggcggcagggccctctgcctaggaaaaccagagatctttgttcacatgtttatctgctgaccttccctccactatcgtcctatgaccctgccaaatccccctctccgagaaacacccaagaatgatcaataaatactaaaaaaaaaaaaaaaaaaaaaaaaaaatttgccaggtgtgatggtgcaaccctgtaatcccagctagtcgggaggctgaggtaggagaatcacttgaacccaggagctggaggttgtggtgagccatgcactccagcttgggcgacagagtgagactacatcaaaaaaaaaaaaaaattctgaaaacaaacccacagccaacatcatactgaatgggcaaaggatggaagcattccccttgaaaacaaaaacaagcacaagacaaggatgccctctctcaccactcctatttaacacagtattgaagtccaggccagaacaatcaggcaagataaagaaataaagagtatttaaataggatgaggggaagtaaaactatccctgttttcatacaacttgattctatatgtagaaaaccccatagcgtcagccgaaatgcctgttcagctaataaaaaactgcagagaagtttgaggatataaaatcattgtacagtggcagttcctcagggatctagaactagaaataccatttgacccagccatcccattactgggtatatacccaaaggattataaatcatgctgctataaagacacatgcacacgtatgtttattgtggcactattcacaatagcaaagacttggaaccaacccaaatgtccatcaatgatagactggattaagaaaatgtggcacatatacaccgtggaatactatgcagccataaaaaatggtgagttcatgtcctttgtagggacatggatgaagctggaaaccatcattctcagcaaactatcgcaaggacaaaaaaccaaacactgcatgttctcactcataggtgggaactgaacaatgagaacacatggacacaggaaggggaacatcacacaccgggacctgttgtggggtggggggaagggggagggataggatttggagatatacctaatgttaaatgacgagttaatgggtgcagcacaccaacatggcacatgtatacatatgtaactaacctgcacgttgtgcacatgtaccctaaaacttaaagtataataaaaaaatttaaaaaataaaatcactgtgcaaaaatcactagcatttgggtataccaacaacagccaatctcagagccaaatcaggaacgcaatcccattcacaattgccacaaaaagaataaaatacctaggaatgcaggtaactagggagatgaaagatttctataaggagaactacaaaacactgttccaagaaatcagagatgacacaaacaaatgggaaaacattccatgctcatggataggaagaatcaatagcattaaaatgaccatactgcccaaagcaatttacagattccatgctattcctatcaaactaccaatgacattctttacagaacttgaaggaactacttaaaaattcatatgaaaccaaaaaagagcccaaatagccaaggcaatcctaagcaaaaggaataccatgttaactggctttaaactatactacaggactacagtaaccaaaatcatggtagttgtacaaaaacagacacatagaccaatggaacagaatagagaacgcagaaataatgccacacacctataaccatctgatcttcagcaaagctgacaaagacaagcaatggggaaaggactctgtagtcagtaggtggtgctgggataacaagctagtcatgtatagaagattgaaactaaaactctactttccaccatatacaaaaatcaattcaagatggactaaagacttaaattttaaaatgcaaaactataaaaaccctagatgaaaacctaggaaatagcattctggacattagccctgaaaagacttcatgacgaagactccaaaagcactcacaacaaaagcaacaattgaaaaaaggggtctaattaaactaaagtgcttctgcagagcaaaataaactatcaatatagtaaacaacctacagaatgggagaaaatatttgcagattttatatcggacaaaggtctaatatctaccatctataaggaatttaacaaattttccagaaaaaaacaaacaactccattaaaaagtgggccaagggccgggggcggtggctcatgcctataatcccagcacttttgggaggctgaggtgggcggatcacctgaggtcaggagttcgagactagcctggccaacatggtgaaaccccatctctactaaaaatacaaaaattagccaggtgtggcggcaggcacctctaattccaactacttgggaggctgaggcaggagaatcacttgaacctggggggcggagtttgcaataagccaagatcacaccacttcactccagcctgagcgaaagagtgagattccaactgagaaaaaaaaaaaaaaaagtgggcgaagtacatgaacagacacttttcagaagaaaacatatgtatggccaacaagcatatgaaaaaaagctcaatatcactgatcattagagaagtgcaaatcaaaccacagtgagataccatctcacactaatcagaattgctattattaaaaagtcaaaaaataacagatgctggtgaggttgtggaaaaaagggaatgcttatacactgttagtgggagtttaaattagtttaaattagtgggagtttaaaaccattgtggaaagcagtgtggtgattccttaaagagataaaaacagaattaccatttgaaccagcaatcctattactggatatatacccaaaataatataaatcattttaccataaactcacaagcacgcatatgttcactgcattactattcataatagcaaagacatggaatcaactaaaagcttatcaatgacagattggataaagaaaatgtcgtacatatacaccatggaatattatactgccttaaaaaaagaatgagatcatatcttttgcaggaacatgaatacagcttaaggccattatccttagcaaagtaacacagaaacagaaaacaaaatactgcatgttctcacttataagtgggagctaaatgatgagaacacatggacccatagatgggaacacagaaactggggcctacttgagggtgaagggtgggaggagggagaggataagaaaaaataacaattgagtactagacttagcacctgcctgacgaaataatctgtacaacaaactcctgtggcatgagtttctctatattacaaacctgcacatagtaccccaaacctaaaataaaagttttaaaaattcagttctatcaacacataaccctctgaacaaagtacttccaactacctactctgtttccatgtcttagaggacatattcaaccatccctatctgaatgtgccttcccaagccttcgaaattcttccaagttattcaacaaacaatcattgagtactaactctggatcaggcactatctaatcactggcacacaaaaatgactaaaatactatccttgccctcacatatctcccaatcttgtgccagaaaggcacctaaacagaaacccccactataatgtggtatatgctgtgaaagaaatatgcacaggatgctacggtagaacaggtaaagggtatctgatctagtataccctgagatggctgtggggaaaaatagaacagaaattccggaggaagtattgactgaattcactcttaaagaatcagtgaaaaatcacctggggtaggtttgggaaaggaagagaatagaattctaggcagtagggacaacattagcaaatgcatgaagactaaaaacaataaaatatgtgctgataaccataagtagttcactattgctgaaaaagaaagtgacacttggaagaatagcaagaggcatcagggttgggattatgagacctagaaaaccatgtaaaggagtttgaactccatctcctaggcaatgcagaatcattgagtgcttataagtagcagagggatgtggttagacttgttatttagataaaccattccctatactttgttttctatatgtacatttgctatggtctgaatgtttgtgtctccccagatttcataggttgaaactaatccccaatgtgagaggattaagaggcagggtttaagggaggtgattaggttatgaggagtctgctctcattaatggcattagtgtcttcataaaagaagtttgaagaaggctttttgccacttccaccatatgaggacacatagaaggtgccatctatgaggaagcccccgaccccgcccaaacaccaaatctgctggagccttgatcttagactttccagcccccagaactgtgagcaataaatttctgttgtttataaattacccagtctaaggtactttgttggggcaatttgaatggactaatacagccttcctctaaaaaagtggcccatagctttcatcagattctaaaaggtatccatgacccaaaaggatcatggaccttggcatggagaataattctaaatatgaccatttatcagaagtatctgttcatatgttaaaatagtcagatgataggacataccccatgcctattgaatcagacttaggatgtgggcatagaaatctatatgttttttaaagctcctttagtggtgctgataggcatacaaattcaggagccattgatcaggaccaagagagctagatttcaactcttaactgccaaggattcatccacatagactctatctctttttgtttacttgcattatcaatgaccttttccctcgaatgaggtcttaacttcatgtgagaatgtgtccttacttttgaaaactacagtaggataatcattaaattgctggataaggcaaccccaattttcttgcaggagccatggcccacctttagtaatttagttgggtgattcccttagataatctgtgatccaggctaactcaaaaaggtaattggcttttgcatggttatttaaggagcggttttgtagcattcatgtaggatgcataaggtattcacctaaataacatgaagacagttgtttccataattaaagattaagtgatatattgcagagttgttgcctttaagcagtttgaggctttatttttatagaaactacaagatgatgggcgaggaaaaaagggggcctcaaaataaagtatttagacaatgttatgcaaaaaatagctaaaggaatttgttcctgccaatttctacaagctataaataaagagttagggagtgaaaaggaataaaccaacatgtaatgcttctgagatatgcttggcttaaagatacttttttcttcaaaaaggttggaaacagattggccatagatataatattcagtgaaaaatctgaatgttctctttcttacctaaggaagggggtggaatatcatacccatttgttgggaaaactaggtcagattatatccattcatagatgctctaagtcagagctagaccaagggtttgggatcatgaagaataacaaaacatattagtcacccgatacagataatttcccatatctgtcaaaaatgcaaaatgtctatcactcttagccctctcctcccctcccatcttcagaagcagttttgcctatcatgaccatcgtctctacgtggttaaattgtattattgataatgtcaacacactggttgatcctttgactcaaggtgacttggtttggaaatgggttcattttcccactgagaatcttcaggccaattaattcaaccttatttggaaactacaggtaattaattattttttgttaaccttgagcactcccacaagataggatagcaaaaaataaaagatttggtgggatttcacgtgctatatttagtggaaatgtcatataaactggaggatgaaatcttcctacaaaatcaaaatccaatatatggaaagactgctaagaaataggactgtcttacttagtaagagacaggccgtttctgctgtaactttctatgattttaagcatttaggaaggcattccttaccccagtattagtagaatctaaggagtccctggataacctttagggagtccatgaaactctttaatgatgtcatattatgaaatgtcaaatattgtgtgcatgtgcttatgtgtatccctgggccagaagtcataactttaactgaatcttaaagaagtgtgggacccaacaagcttgaaaaccaattgctctagcatttccacagtaatgcaaagcctactttcgtaagtcctgaatgtctccctatggtatagccaatctacttttaggaaaggtgctgtgttgtcttcttattggctaatatttgttttcaaaaatgcatttcgtttattgtctgtgaatttgcatattcataacacatcttaaattgaagtataacatagtaaagtgcataaagagaggttaagtatacaattccttgagttatgacagttatatgtacacttgtaaccacctcccaaatcaagatataaaagatttaaattaccctaggcacttctctcataatgctttagttatttctcacctccttcccaatgcagagacaaccactgttcttattattatcatcacaaattatttttgccaatttcaaaacttcataacagtattttcttaatggcatcttctaatgaacttttcactgaaagaaacttttcatcaaaattgtttatttttatttttattcctttatttcatatttttttttatgattactttttgtttgtcctaagaaatgttttcttactccaaggtcataaaaatagtctccaaccttttcttaaataccactgcttttgatatgttgatcttgtatagtaagaccttcatatattcacttatttctattagttttttgtggattctttggggtttctaaatacttctaagtagaattgaaatagctttacttcatccttttcaatctttatgactttaattttttattattggtattactgcactggctgggattccagtacaatgttgaatagaaatggtgagagtggactttgaactgtttctgatcttagagggaaagtactcaatgattcaccattgattataatgttaactgtagggttaacatgttgagaaagttaatcaggttgataaagtccccttctgtttctattttactgagactatttataataaacagtggttgaattttgttaatgctttttctgtattttttgaaatgatcttattatttttctctttgctaaaaatgtgagtaaccttgagttgactttctgtgtaaatcaaccttgtgtcccaggaaaaaactccaattgatcatgatgtgttatcctttttatacattgctgtattcaatatgctaatatatttattttttgtgtctatttcatgagggatatcagtatgtaattgttttttcttgttatatctttgttggttttattaatcaacattatgctaacttcatacaatatattggaacatgctccctccttttattttctggaagggttcatgtaacactgaaattatttcatttttaaacatttgatataattcattaaaaatccaattgttccttgatattttctaaagaaaaggtcattgttacaaattcaaaaccttaataaatataaggccatttatattttctgtttctttttgtgttggttttggtaaatttgtatttttcaaaaagtttttcactttaacttgttaaatttattggtattaatttttcataatgttctctttttggtctttaagagttaatttaatttaatgagtgtacattattttttaaaataaaaaagaaaaacttgaaaatgcaaattaacaaccacatccccatttgccccaatacgctgtagaccccaccacaaacacaatacagatgagtgaatcaacagtaacgtgctcagagctggggcatgtgactgttatgaccgagttccatattattgtctacacctaatgcaatggtgcaatagagatccatgtgatgtggcacttcaccatggaaggttttgcagattgctgaatcgagacaggcagtggaatataatagaaagcacactcggaaatagattggttgattcgtagatttactagtaattattatgtgaccagggacaatctcttaacttccttatgcctcgtggtgcagcaaaatatcacaaatcaccactaatgaacttactgatataaccaaacaccacttgttccccaaaaacctatggaaataaaaataaataaataaataaataaataaaccaaaatacctccatattgaccagataaggaaactgaggcataaggaagttaagaggttgtctctttttggtcttctaataccttctaatacctgtatagtgatgttctctcttttgttcctcatattggtcatttgtgtaattaaggtctgctagagatgaaatttctcaactattgtctgtctgaaaatattcttgccattcttttgaaggatttttttttattagactttaagttctagggtacatgtgcacaacgtgcaggtttgttacatatgtatacatgtgccatgttggtgtgctgcacccattaactcgtcatttagcattagatatatctcctaatgctatccctctcccctccccccaccccatgacaggtccccgtgtgtgatgttccctttcctgtgtccaagtgttctcattgttcaattcccacctatgagtgagaacatgtggtgtttggtttttttgtccctgagatagtttgctgagaatgatggtttccagcttcatccatgttcctacaaaggacatgaactcatcattttttatagctgcatagtattccatggtgtatatgtgccacattttcttaatccagtctatcattgatggacatttgggttggttccaagtctttgctattgtgaatagtgctgcaataaacatacatgtgtatatgtctttatagcagcatgatttataatcctttaggtatatacccagtaatgggatggctgggtcaaatggtatttctagttctagatccttgaggaattgccacattgtcttccacaatggttgaactagtttacagtcccaccaacagtgtaaaagtgttcctatttctccacatcctctccagcacctgttgtttcctgactttttaatgatcgccattctaagtggtgtgagatggtatctcattttggttttgatttgcatttctctgatggccagtgatgatgaacattttttcatgtgtctgttggctgcataaatgtcttcttttgagaagtgtctcttcatatcctttttgaaggatatttttagagggcactttttatctttgattctcaataacttgactattttgtgctcaggtatatttttcttcatatttatcctgtttggaattgattgagtttcttggatttgtgagttaatctaaagattacatccatttttgaaaagttctcagccattgtgtcttcaaatatttttttctcccctattcactctaacctcttttttggaggactctaattatttaaagttagactgttagatattatccttctcttgtggaagctctctttgtgttttaaatgattttttctttttacatttcagtttggataatttttattgatatgtctttaagttcactgatttttttttttttttttttttttttttgagacagagtcttgctctgttgcctgggctgtagtgcagtggcacgatccggttcactgcaagatccgcctcctgggttcacatcattctcctgcctcagcctcccaagtagctgggactacaagtgcccgccaccacgcccagttaattttttgtatttttagtagagacagggtttcactgtgttagccaggatggtcttgatctcctgacctcgtgattcgcccgcctcagcctcccgaagtgcttggattacagacaagttcactgattctttagtctgctacattcagtctgttgttaaacccatcaaacaaattatttctgatatttctatagaatttccatttagttcttttctatcttttcatgtttctgcttaaactcctcagcttttcaataatgttgtgcattgttctcactagattatttaacatatttataacaattatcttaaagttattttctgctaattccaacagttgggttgtatgtggatctcctctattaattttttcctctttatcataggtatatttttctgtttctttgtatgtcttgtaattttgtattatatactagaaattgtgtataaaaatgatagttatgactgcagtaatactgtgctcagaaaatatcatgcttcttcttctgttaggctgctggtgagagatctcaatctgatttgtagttgagcagggtctgggcttcattgcagctttagttagattctgttcaccactggcttcaaatatttgaggatggggttgagactttcccttcagtgggctttggatctcagcactaccaccaccagactctaaaggtctctatagcttacagttcagcttccagaattccaagtaccatgaaaatgctctgtgctttatagttcagctgccagttttttggggaacagagaaatttcctttgcttttcatctctacccctaggtctccttaccttgggagatctatttctccccaggctgttacacactgctcccagccttcagcaagacattgcattgcacttgatgacagcacctcagggcatctatctcagcaatcctgccccttccccagctttcattaagtcactactttgcatttgattaaggtcctgtgtaccttcaaaatagactctctcagccctcatgccttgctcccaggctttagggaattgctgacttatacttggtgaaggtcctgtgaacctcagggttatttttcttaacttccttgtccttgtccttagcctttgattggccagtgccatgtattcggcggaagttcaatatacctgggtggggacatcttttctgtgtgcttcagggaaatctttctcaactttcttgctcttcccctggtctttagtaggccaccgccttgcactgttatggtcctctgcatcttggaatggaggggatctttctcagtgttcttgccctgtcctcagtcattggtgggccactgcattttacccagtaaagatccagtgtgcctcaggcggatttctcttggacctcctatcctgcctctagcattgagtatcctgctacttccacttggggaatgccccatgggaaaaaattggcaggtgggtaaagatcaatatttgactggattaccttggaatttgaatttctcatgccaacccactgatggccactaaaaatttgttagcagtttacttgatttctccttaccccactctataacggagtaacaccctagagttactaggaatgaaagcagtcataggacacttttctcctaggaatgcattgtgtcttcctaagatttggtttatttaaatttctttgcatcttctgctctctgctaggctttaagttgaccgcaatattgcagcctattgaacttgtactcattgtactcattataaggatgagagtgcaactcctgtaactttctacatcgtaaccaaaaatttggaagtcaattatttcatgcccaaagtcttcagagccagatcttctctaacgactttgaaaataatatgctttctactatcctccacatgctttctctggcaagtgcaatagaatcagatatgacccacacttcagtgttttgcactgaaactttttcattagggggaaggaagatgagattcaagagaactattattattattacttaaattttttctgggagtacctgctgttagccaagcagtcatcctgagccctatcaaactgaacctactaaatctttgtgttatgacaatgtctttcacacagatttagaccctcacttttctatctgccacttacttctggtggaaggtgtccattaggtccctttgtaagaaaaaggtttacttcatacccttttcagctagttaaatccctactcattttttaagatgtcagttaaatgcatatcttccatgaagtcagccccagcatatcttacagccttgctacactgctagtgtaatcatcaccattttctattgtgtacataatgctaggggaaatatgagacctccttcttaaaactgcccacagggtggggcgtggtggctcatgtctgtaatcccagcactttgggaggccaaggcaggcagatcacctgaggtcaggagttcaagactagcctggacaacatggcaaaatgctgtctctactaaaaacacaaaaattagtcgggcgtggtggcgcatgcctataatccctgctcctcagaaggctgaagcaggagaatcacttgaacctgggaagcacaggttgccgtgagctgagatggcaccaccattgcactccagcctgggcaacaagagtgaaactctgtctcaaacaacaacaacaacaacaacaacaacaacaacaacaacaacaacaacaaagtgctcacagattatctagaattgggtttccgtgacctgacaggttattatctcccttggagtaaggatgaggggctagactagcatcttccaaatcataggtcctatgagggtaagagaggtgggtttccctaagagaaaacgggctgctcttggcaggaaagggcactagctgccaagggggtgatatttaaaatgctttaattaaaacttagttgatatgaatgttaccagaagaaaaagacaattgagaggaatgcttaatttgtacgtgtttcaacctaaaaacaagacacaagcgacatggtacccaggaaaaattttccaacatccaataagatggctaataccagtaaattggtctctgcaaggaaatgatagccaactttttttctttcttaaccactgaggaccccttggttaatttcacttccctggaccccaatttatttcaaacactttggctgccaaactgcaattatcaaaaaaatattaaaccacagactcttagcaattatagctcagcattattttcccttctttttaactgcgtggcaattaacctggtggccaaccaaaaataaatatactaatttccttatttaaattctacatagctttttattggagaagtttagattttctactagtagactttatttttattttttgagacagagtctcgctctgtcgcccaggctggagtgcagtggcacgatctcggctcactgcaagctccgcctcccaggttcacgccattctcctgcctcagcctcccgagtagctgggactacaggtgcccgccaccacgcccagctaattttttgtatttttagtagagacggggtttcaccgtgttagccaggatggtctggatctcctgacctcgtgatccgcccgcctccgcctcccaaagtgctgggattacaggtgtgagccaccgtgcccggctagactttataatatattgaaatatattgtgaatatgcagtgaagatctttaaaatagttacaacatttgacctgccaatttcatgtttattatttgtcctaaaacagtggtcagggatatgaacaaagatttatcttgaggaatatttaccactgcattcattacattaaactgttgtttaaatgtttaccatacaatagtaagaaattacaaaacacctaaatttccaagagtagaagttgagtgaaaacagtatgaaatataggaaatggccagacaatggagcactatgcagcattaacatttgattagataagatgatttaatgacatggaaatatgttctctatacattaagtttaaaaaaaatgttctaaaatgacatctttggggagcagccaaaatagcctccaagtctccttctttatagcttaacatttttttctgctctaagatgggatgctacgatcctgtctgattaaagacacattttaggcctgttttaccagcatatttggtcaaggaaaccaagttatttgcagtttagtttggaacagaaattcaaacttggcaaataatttgcatattgacagaagcatgttttctttctttataaaatgtatgtcaccaagaaagaaacaataattggcacctaaacttcatttcagtactgagctacctcaattacattccactaagtagaatgaaaaacaggccatccctcaaaggcagacaaaaaaaaaaaattgtgacttagcacaatttctgctgatggatttctgattcctgaatgttatgacgatttcatgttaagaggcattaaaacatgattataattgaaaacaagagggcctgtgacactagagggaccacggtttaatttggattagtattaaggtcctgaacattaaactaagaatatttcctcttcaacaggttaaaataaactattttggcaaaatattaactattactaatgggtaaaaactacatattgcttgtaccaggtgctattttaagaactttacatttattaactcatttaatcctcaggagaactctataaagtatagactactacttacctgaaaaaactgaggcacagagagatcaggtaatttcaatgaggtcacaaaactgtgaagacaaagagtcaagattcgatcccaggtggttgggctccaaagactgtaattttaacctgtaaacttggacagtttcatctgcatgaggccaaaagctaataaaaaccttgaatccactctagtaggtgagtacctccactgtatcctctaaagcatgtttcagcctagaggagtacccaacctagtctaatttctcccccaatattttgagttcctgcataccacagaggctgcacaaagtcaggggaggctaacgtaggatgacgcaggcatctacacataacttgtcattttctcatctcatgagtggactcagtggaaatgctcagaccataaatcaacaccatctgtaattgaggtttgctcaaggtatctttgcatgctatagcattcattgaaatatctgtgaggtaggttagaaccaaatttaacagttacttctccaactagccttctcatttgttctccaacttgggaatgattctatcattagacacaccctggggccagattttacaagtggcactatcataacagtgtgccagcttaggacctgagttcaccacattcctttctgagcctactctgatgatttgccttggactggccttgtccaagctcaccttgacatctgccttgttcagtgctcagtaggcagttgttgtttagaaagtctttgtaagtaactattttaaagtcaccattttacagatggacaaagtgaaatacagaacacaaaatgtgattgatgtcataaagcaaatcaatgctcccaaatgcaatttgccattcgctctcctgtaaatatgtgaaattggtgacttaatgttcttactgtaaaaatgcccaaagaaagagaatagaagaagagtaacagagttgggggagagctaccactggaatggaaggagcgagggaggaaaataggaaaggaggaaggagtattgcgagaacataaaaccttactacagtggccctgaatcatggagctgcaacacacctggagcacttataaattcttttgagaaatgccagtgtgacatacgcctcgcaagccagcaattcatgaactcgatgcagtagttgaaaccaaaggggtaatggccacagctgtcaggatccagatgctctggggctcggccctgccactttgtcccagcattcatgcgaaggaatgctgtgaactgggcatatcaccactgttcaccctggcctgcttccaacagcaccggctgcatctggcctggaagatggccatggctggcggccctatgttccccataaggttgggcactgggctgcagccaggctgcgagtgctggacctacatccagcacactctccgtccaacctcatctgcctgtctaccccagaacccccaaggaagcttggcctttcctggcacacagaatcctcctgagaactggcgtctttctgcagtcaacagaaaagatggaatgaaaaccacacagatgaaaagtcatgtcatttattaataatttcttttttttttcttctataaattggaaggaaaaagtctttggtgacactctctataaaacaatctatcttggatggcgaaacccagacataaagttacacaggtcagtgaagtaaatcaatatctatggctttgtattttctcacacgcgctctctcacacatacttgagggcttaattacgctaagtcattaatactctataacaaatgggaaaaacacttcagaaaagacctgtggtgacactacaaaaacattggcaacatattagaaaactctgtcccaagtgtacatcgtatacaaaataaggtatacttttgttttttgcgttacaatttgccacctaaaatagttccagtttttgatgtctttctttctgcccctcaacatatcctatacatattgttctctcaaaataagtacacaaggttcattacatggtaaccaggtcatttgcatagccctagttttagtaatagttacaaccgaaaggacagggatgtattcctgtaggagaagaacagaaaactattgcagaaatcaaatggcctgaggcctaaaaggcaaatcattacaaaaccagagtgactgaaaggctagcctgacttgattttaaacaagggtgagactgtgctatcctgagggctcagctttctcaaggtttgccttcttctcctagttgctgggccatgttaagttccaattctgggtagctcactgaggttcctgatataaaatgtattggaactctagaccagtgacaactacaatccctactaggtaaaactcatggagacaaaagcctttgatttttggaaagggcaaaaaggggagagatggttttgaggagtcaaatccatcatcacaattatggtgtaaataacagcttttttatccagaggttctgtacagcattattgaactgatgggagagaccactatcttagggtacttaatcccccaagcttttttttttttttaaagaaaaaaaaaaggggggccaggcgcagtggcttacacctgtaatctcagcactttgggaggcagaggcaggtggatcacctgaggtcaggagtttgagaccagcctggccaacatagcaaaaccctgtctctaataaatatacaaaaattagcccagtgtggtagcacatgcctgtaatcccaactactaagcagggtgaggcaggagaattgcttgaaccggggaggcggaggttgcagtgactgagctgagatcacaccaatgcattccagcctgggtgacagggcaagactctgtctcaaagaaaaaaaaaagacttggtgtcaaaggataaactaatctctttatgctgaagttcttataccaagtgagacaagtttagcacagtttgatattaatgcttatttgctgagaactcaactcaaaacaactttgtccctgtaagcatgcctgagaaaatgaggctgatagtgaaagaaatttcttggttaaatctggccaagaatgacaaaaccaactgaaaggttcttgtccatagtcgctgtaaaggggaactaggtaaatgaattcagcaactgcggtcctgatgtactggctgcatgttgattatattcacaagtaagaggcaggagcatttttatttgagagttcatggcaataactgctacttttaaatactggagatctcaagagacccaagggaacacaagacacttccaggtctgggaagtttgcttggcttttgcatccataattcagccttgtccagcaagaatctcattcagattccaacctagtaaggctgtcttccccctgatcctgccctttaaacaggtttgttcttaaatcaagtgccctgttttttttttttttaattaaaaaaaatagtatataggcctattcacattcattcatctcacccctgattaaagttcagtaacctttatgaaaggccaccagcataatactctttcaagtcaccaggtatttgagaaccaccaaaataaaggctaacatagcctactgtaatgaaaaccaaaagtcattctaaaagggaaattgaaggatgcaaccggattgatccttctttgagcaccatttgtcacaagaagaaattaaactgtaatgcacataagattccagtaacaagctttccctttttttttgaagcatctatctgaaagtgtgttgatacgaccaggtaggcccacctagctatgctatcttttgtggtatgactatcgtgattatttcatggatttttctctacagtctcaattttgagccattttgctagcttcaacaaaggtgatatgtattaatgtatttgtaagctttgatatttataacactttcatataaataaatacacagccagcttttaaaaaattacttttaagatcctgtgtcttaatgtggagctgggaaaagatgctgtgtggaaatccataagtggctgagtcctctttggaatttctgcaagcaattcattacgtggttggcactgtactctcagcccttggcttctctccaatgcagcacatgttagcccacttagggacccctagttatcattaaagttgaccaggagataattcctgacaccctacagagatggctatgatttgtcaacttgttgcaatgcaatacaactctttcctaactgaattaaaattacatattactgtcgagcttcactgatttgttaagcattgttctattcccagccttatattccaaatgggagaagaacacgctagctcacatcccaaagagatttgctcagagaatgacataaaatgaaactgtggagatttaaagtggatgaaaggtgtgttatatcctgttcttatttataattaccatttttcttcacataacacatgttgtttgtggaggatatgtgttgtgagcttggtgacaggtcaatctggcaaagcaggtccttgaatccacttgtgtgactgactggtacaattagggacattgctttgcaagccaatatgaccacctaagtttcaagttggttttggggtcattgaacaaaatatcgcatttattttttggtaaaggagaaacaagaataatttgccaatcctgaaaaaaataatttaaatacaaattcacaaaggccaaatgaataaagattaactgctaatcttttaacttgctgagaagtgcagcttaaatgacatgaaacctgtaagaccaaacattttatagaaaagacacaagtgcaagcaccatggacctaagaattatttttcaacaaatgcctaagagataatcacatctacttaggggaaaatgtcacatgtttgagaatggactatggatgggtccaattagatgagagaggtatttagggagctgttctgagtcatgaggctgaggagaaaatcctctctttaattgaatttcactgtctacgcacctctcaaaacaccatctggatatgtgggctctactccttgttctgcagctaggtagcctgttgagtcacttctctggacttccacaaacactttcactcctgtttacagcaccatccccgtgctatcattacaagctcctcttcctctcccagatgtctacaaagaaaggatgaggtaaagtccaatggacttacggtttccactgacctaagatggccacttgaaattatcagaacaaaattctctgatgaacttttcttctaaaacaaaactgaaaataaatggaaaagaaatatgaaatgtatgagagtttgagggagggactctaaagtgcttattgtttattcagcataatacatggtcaaactcaataatgtctttctcttccctgttttctctggcctcttccaagtagaagaaagcatttaatatcagaagtctccatttttcataacagagttagggatatgttttttttttcagtttatacttggagtttaacaataatcataagcccaagatagcattttcagggatagaaatgttctttttaacaagaagcacaactaaacttttccacagatttaaaaattaaaagtaaatgaaactatattcacatttgttgttgattattttgtttgccagattcttgctcaaaacaatgtttgaccaaaaatggcattagggtcccaatggcgagacatctcctcagttactttgcagcaatcctcttgttcattggtgtgaatttctaccttattacccctttttctttctcaaaagagaaactctgaaacttgagattctcacaaacattaaagagttcatcttgtaaataatctgttctccccaatatactcattattccttggcttctaaaccaaagcctcttcccagtgctacgcagacttaggtcaatggttgaatctataaccgtgcccccaacccctgcaagtattgggttactgttgtgggtctgtatttccatctcactaacatgctggtgggttatctggatagttctttgtgcaaactgaacatttcttaattatactagtgttttcttggtactaattccccccacccccccaatgaaaaacgattatcatatatatctatctcaaacatagagatttcagttagaactgcctacctggaagtcgtaatactttctttcatgcagcgacattttagagataaaagttcaagtggatttgaagattcgaagtggaaaacaatttgcactggcaaagttgaataatgaagttacaacttatgctcagttatttcttgataatgggtagagtgacttattgtgttttccacgaagtttgagcttttgaaactgcagggcaccctacatggccatgacaatgatgtctgtgggaaaaggaatagcagctttgaaatattcacaaccaacacaattttgattaaacaaagaactctggtttttaatagttttgatcattaaaaaagtttaaacctgcatagcaatcatttcaaaaataattatttaatgttccataattaaactgtacacaacctagtcttgggacacagaagccagtgaggtgagtttggagcagtctggtgcagtcccaggagccaggagttgagttctcattggcctttttttttttgtcattctgctcatctaagtttttggatagttggcacaatctggctctgctgatgagtggatctgcactgggaagagagagcagcttgacccccatcccttcttgcttcccctcccccactcagccggattcctcaaagtcgctcaatgtctcggtatttcttcctcaaaatagagacctggtctttaaagaggacggggtcgagcctcatctgagagtggatcagcggcatgtagccaaaccagctggcaaacgtattcatgcagctctgtcgctgggcaaagtggtcagggtcagcccaacgggaagcccgagaagtctagggagaaggagagaaacaaggataatgatgagagaagtgcaaggtgagatggaaacattgcagaaaatggagtcaggcaaatgagcaagcagcaaagcttggggtctggcccggccaccaagtctcaccatctatgcacctgctgaaaatgcaatcgctgatattggtttttcccaaggtatgctacgttcctcagtgttaaaaacacaaaaacaaagattcatgttgactttaattctctaaaatttattgactaattctctggtcagtccacgacttagcaactgaaactcgactactacagtgactcaatctaaaacctctctttgcacttgggaccaagtactaagattaaagatgtgtttctgctttcaaagagttttctaaatccttcctgtttatgtagttgatttagaaatacccaccaacttttagaagtctatctttctctctatccatcacttccttccttctactatctctttacctttataagggtcctactaaatcctttgttaaaaattcacatatatagttgaagaagaacaaaatagtgccttttacatgtcactcaaggctagtgttacgcagcatctaaaactccgttttctcttctgtagcctccccattgacgtgactccatgaggatgagaaggtgagattcagtggtatatagagcatgttgctgtatgactaactttatactaaaatctcaaaattctgttcttctcttaacccaagaattgttggctttcctgcttgactaaaacccccaaaggttactttttaaagggcaatcagccctccaaagaatcactgctcacccagaataaagattaactctcgacaaatagaaaagatggctaccatgtttttagctctctgtgttgcccctaaagttggttaaatatttttagatcatgcaaatgattggcattgatttaaaaagaatgccttaatgactggagtgctgaaatttaaatagaatgactaagcacattgtctttcaatccctgtttttatgaaacatggaaaagatgggctgcccaattatgggggaacccccacaagcccatttatgtcaataggcaagtctttaatgatgtatatgtatgcacgtgtgttctgtgtatttgttgtactcacagttttagaaaaatactttcatgggaagatacattttagtgtgagaagcagtaagagtcacttcagaatcatagtgtcaacatgctcgaaaataacattgaagataaacacaaatgtcaagttacctctgaacagcagaataacaaacaaaacactatttgtaaagtgttttcatggagttcatttgaatctcaccacaatctggtgaagtatctacccaggtaataacatccccattttatagctgaggaagcaagtttaagaaagttagagttatttgttcaaggctagagaggggcagaactcaagcttcattcttcagcctttatatgaggggaactctacttgataaatcagagaaagatatcaaatggagctgactggttgagttcatatcagagtagacaatcccaaatgtaacttgttttgaccctaaatggatatgagtttgtgggccatttttttttcttttttttaaaggcagagtctcactctgtcacgcaggctggagtgcggtggcatgatcttggctcactgcaacctccaccacatgggttcaagtgattcttgtgtctcagcctcccaagtatctgggattacaggtgcacaccaccatgcatggctaatttttgtatttttagtagagatggggttttgccattttgcccaggctggtcctgaactcctgagctcaagcaatccacctgctctggcctcccaaaatgctgggattataggcatgagccactgtgcccggcctgtgggccatttttgattggcccactcattcccaaagggtgctgtacccaggcaaaatactcatatatgcaactagaaatactgtctagagtttacactcattcctattcaaaaaattttttttaaagttcagttgaatcattcaggtatcgttttgcttctagatgttaacatttattctgagtcaaccaacatctattagaaaagatgcctttcttatgtaataaaagcctaatcctagaggatgatatctatttactttaccggtcatacaaacattcaataaattaatgtgtatgatggaaagaagggggcaaatatagtacctgaatacacctagttagacctaaggttaaatttagatttttttgttaaagatgtatgaattactagaaatactgtttggtagaattaggctaatctatgaaaatagcacaaatccaccccctaagaggccttgtatgactagaattccccacttagtgagtgttctgaagaactctgagtaaaaaaatatttttaaaatgtcatgtccttaaatgagataatatacagtcatgcaccacataatgacatttcaatcaatgttggatcacatagatgactattgtcccatatactgtaataccatatttttattgtaccttttctgtatttagaaatgtttagatacacaaatatttatcactgtgttacaactgcctacagtattcagtacagtgacatgctatatatgttatagcctaggagcaataggctatagtaggctgtaccatatagggctgtgtaagtacacttgataatgtttggataatgacaagatcaccaaatgatgcatttctcagaatgtatcctcattcttaagagataaataaaaaatataaataaaaatgtttgggcacataatagacaatacatcttgcttgaattcgaatattctctcagccttaaaaatttttacaaatcctcttatctgttctttctgtaattagaaggaaacagaattttctgccagactctttgctaaggacagctctttcatcataaccaatacctagaacagtgcctggtaacatgctcactaagtactaaataactttttataaactttaaattctttataaactttaaatttttgcttactaaatttagtgaatgaaaaactatcagcttaacatgaggcctagctaagatttcctttgcaaaagctagatttgtatatgttttccaatgcctgtgagaacaaggcacatgcaaagcccctcaaaattgaactaatataaccatgttaaagtatgttcattcagattaacctcaatcctgttggatgctccatgatttaacgtgagtgaatcttaatgctctttcttaaggttttttgtttcttttttctttttctttttttttgagacagagccttgttctgtcacccagcctgaagtgcagtggcatgatctcaacccactgcaacctctgccttccagtttcaagcaattctcgtgcctcagccacccgagtaagctgggattacaagcgtgcaccactatgaccagctaattttttgtatttttagtagagatggggtttcgacatgttggcaaggctggtctcaaactcctggcctcaagtgatctgcctgcctcggcctcccaaaatgctgggattatcagtatgagccactgtgcctggctaagatttttgatttcttacatatagtaggggctctgctcaagatgaataaagatagatgaaattcggcatatccaggtggacctgataccaagatggtggggtgtacaaggacaagcagtgaagtccacagaccctgggattcaattcccaattctgtctctaacttactgggcaacttgtggcaatatgcttaaattcactaggtcctagttttcttacttataaaaagaaaatgttggattctatttccttgaaaatacctttaatactaaaattgtataactcaacacaatattttacttcacttttataaaagctttcaaacatattatttcaaccctgtaaggtagatttcaccatttccatgttaaagatgagccaactgagtttcagaaggttactgacttgcctgtattttaaatcctgattctagaactgaaaattaaatattgtgattcctgttatgtcaccaagacacaattcaactcaactgcaagcaccagaaaactgtgttaaagagagtatggtttgctagacattaaataaggtacctacaatcaactttcataagttatttgtagggctttaattctgctgagggctgaatgtttgtgccccctaatatttatatgttgaagcttaattcttaatgtgatgatatttgcaggtgaggtctctgtgggatgattaggtcatgagggtggagtcctcacaaatgggagcagtgctcttataaaaaggaccctagagaactctcttgcccttctttctgccatgtgaagacacaatgagcagagggctatctatgaatcaggaaacagtctcttgtcaggcaccaaatctgctggtgccttgatctgggactctccagcctctagaactatgaaaaataaatgtctgttatttaagtcacccagtcaatggtatttttgtcatagcagcccaaatggactaagacaaactctaaagacatatctttctcatgtcaccttaaagattataggagagctttacatccttggcataaagatactcttaacttgtgtcttcctaattatccctgcaccaatcatacactcttttctagctttcagatgtagttcattcctggtttctcctcattatatgctcctgggtggaacagctagaggaacgtgagtcctcattacctggggctgaaccaccagtgagtgaagcaagggaagagggctcttctatacttacctgtcccatcattgtctccttatactgcttcttctgggtcactttgattggaggcaattttgtcacagcagacaccaggaagttcatgagaatgtcctcacaattggccaattggtccaccatgttcttcaggctggctggcaggtaatgggagtataggtagtgataatatctgtaaaaatcaaagatgggtttcacagggggccattatcacatgatgacaagtggacttctgagacagaaaacacatacccattctttgaatccctaaacatgtcatgaatggtaatgataatgatgatgatgatgacgataactatcacttctatggtacttgttatataccagatattgttctaaagtgttttacaagaaatgcttcatttagtcttcataaggagcctacaaggcaggttctattattactcccattttacagatgaggaaacaaggcacagagatacagacatacagacattgcttgtccagtctaactctaacatcagacaggtgagttagaaagaagaactaaataattagatggcaagataagttatttacacatgatctatatattataaagctgcttaacaattttaatcattggcttaatcagaactgtatttaatattatcccttgactctgagtccaacaatagactgttctatatttgtgccctataaaccatatatatttcaatcctgttagagcaaaatctgaattaatggggtggtcaatcgtaacagaaaacccataattaatttgaattatttctcatcctactgtttttaaaatgtatttatatacatatagcatatatttataggaaaaatcatttgagtgaatcaaattcttagagtggtggtggcagaagcaataggaacaatgaactttcaagaagtgaaatcttgagaccaagaatcagtcagcctaaatgtttatgccttgagcatttccaagctatccctgagatagcaaaattccctattctttactaaaaagactaaggcaagattggtgtgttcactaatgatagaagagcaggtattttgttactggttgagtggggaatgttagctatctaccctcactagtttggcaatcttactccagtcccctggctttaaagaccaaatatatgcaaacaactgccaaatttgtatctccacccctgagctttttccatatatccttttggatgtcttaacatgtccaagactgaacctatatattttccctcatacttgttccatctgtagttttcctcatctctgttgatcagccctctaatcttccagtgtttcaggtcaaaagacttggagtcatcaaactctacatccagactctctaggcatcatgctaaagcatcttcaaaataatctgatcactacttaccatggccaccattcacttcctggtcccaggatcccaccatctcttgcctagataatgtcaatcacttcctaatagggcttctgcttcaactctgggtctgttatagcctcttctcaacatagaatccacagtggatgcataaaagaaaagccggatttctcctccctgttcaaaccctgtcctcctcccctgtcacttagagaaaaagtcaagtcttcatgatggacatcaaggtcctgcaggatttatcactgtgttaaaactgcctacagtattcggtacagtgacatgctgtacatgtcacaccctgttcaaaccctgccctcctcccatatcacttagagaaaaagtcaagtcctcatgatggacatcaaggtcgtgcatccatgccccctgacttttctgacttcctgtcacccattccacccagtcacagtggtctcctcgatggttctccagtattctgcctcagggcatttattctcgctgttctcctgccacaacactcttggtgcacatgtcctcttgacttcctgtccttcaagtctctgctcaaatctcacctgtgcaatcagaatcaccctggacacccccaatctgccccatctccaccttcagcacccttgatccttttctacactttgtctgttatatcacttatctccttaataaactatggaattattatgtagacagtctttctttgttagaatataagacctgcattggcaaggaattttttctgctttactcagtgatgaatcccaagcacctagaacagtgcccttgggtgctgacttaggtatttacttttgttgttgttattctaaatattcagttacctaatatgccctgagagtattttcacacttcagaccaactgaaaatgttactctaccataatttctggaaatgaaacatgccaagaggtttcactggtttcaaaaacacacatttgacacatcagcaaaacttaagcggggatacagactaattttcctcaatgctgttaacaagatttggccttagttcctatttatgcagcagccaatataaaaagctatgtaaagtctgtaagagacatgtccagattcctcacttgtggtaaatagcagctcctgtcaacaccatggagtagtcgttcgtccactttgatgtgtatccccaccgctccttagagttatcccagaagtggctgcgcgcggggtaccccacaatcctctcagggaagctctgccacactgtgaaggcgaaatccacctgcaggcagaacacaagccaaacaagcaatcaacagtgttaacaaatgtcaacaaaacattaccttctccccactaattcataatgcaaaatccggggactgtggcgaaacattaattctatgtattcatcagcaaattaaactgactgcttgacattttgccccataattatgcacattttaatgttttctgttaaagaaacttcagagtagtatggaaatgaaaggaagaaaaaaatttgctgatatgccctttaaaaatccagtctgttcaagctaaaacataagttgaaaaagcttcttttcccccttcctcaaaggtgcacgtgccttgattcacgtgagacacaaacacatctgttttataaatgagaaatttcccatgtatatccaaagaatgaatatacaacatatatcatacccagcatatatcaaagccaaagtgcctaaaataaaagcaccctcttaagagtaagagaaataactttaaaaaaaaaacaccacaagttctaacaggaatacagagcaggtatcataaagaaaacataattcaggcttcttaggtttgaagatgcacagtttaagagacactagaagaaagcatcaacagtgaaaatcactaagaataagtggggacaagaacaactgaagccacagaattattttaaaggaaatgcagctaaatgtctctccggtgcttatagtagcccaaagcaggtgcttctgaacctgctataaaccagcacttatagttagcaagtgatctgttttcaaatgcataaactcacttctgatttctatgatcatttgatgaatggtaaatcaaaataataaacagaaaataaaaataacaaaaatagtgacagcaaacaatcatataatgctcataattgtgaaatgttataatacaacaggtgcagctataggtgcttatccattttaactcattccatcctcacaatacccctgtaaggcaggggcttttacattcttcagtttacagaaagggaaactaagatataagttcaagtaatttgctgagctaataagtggcagagccaagattcaaactcaggcagtctggtttcaaatgtgctacgtactttatcaaaacttctcttttggctctgttactccagtgttaaaagcaatttgtctcttatacacgctatgattcacctcgttatctttgccgtatctcttctggataagcaatacaaatggaaatttcatctgtttcgcaaatattttgagtcctggcactgtgatggtagctgggggacggagggatgctgctaggtccaggtcctgccctctcagaggttccaaagcaggacctgtgatggttaattgtatgtgtcaatgtgagtataccatgaagtgcccagattaaagatgatttctgggtgtgtctgtgagggtgtttctggatgagactaacattggaatccacgggttcagtaaagcagactgccctcgccagtgcagatgggcaatatccagtcagttcagggcctgaatacaaaacaaaggtgaaggaaggaggaattcctcccctttttctttttgcctgccggctgagctgggacatcgaacttctattgcccttggactgggatttacatcattggctccctggttctcaggctgtaggactctgtctagaattacaccagtagccttcctgggtctgtagcctgcagacggcagatcatgggatttctcagcccccaggattatgtgagccaattactcataataaatctctctctcagtgtatgtatgtatgtatgtatgtatgtgcatgtgtgtaggtatatatatgtgtgtgtgtgtataaatatatatatatatatatatatatattatgttctattgattctgtttgcctgaaaaatcctaatacactgccctatcttaagataaggaagacttaaaaatatggcttgttccccaaaactataacatccacacggggccaggcacagtgtctcacgcctataatcccagcactttgggaggctgaggtgggcggatcacttgaggtcaggagtttgagaccagcttggccaacacggtgaaaccctgtctctactaaaaatatagaaattggctgggcgtggtgttgcacgcctgtaattccagctactggggaggctgaggcacgagaattgcttgaacccaggaggcggaggttgcggtgagccgagatggtgccactgccccctatcgtgggcggcagagtgagactccgtcaaaaaaaaaaaaaaaatccagagcggggaaaaaacccgggtggtggaaccgacattaagaaagcttggtagggagcacgttatctcaaagttaaaaggtagcaggggatggtgagcatctgctagaaaattgaaattaggttgtgattacctacaccttttcactagtggtcaatactaatggagacaactgatgggacagtatattatgcagcctgttgtcaaaggatcagcctggccgtcagcactctttggggttttctatcattctttgaaaaggaaacacatgcactagcaactactacagaacccaatggggtgttctcatcgcatgaatttcttactatcttaaggctgtttcaagtcatttcaaaggaactcaaaagtaaattcagataaaactatgattcttgtgatagctctaatttcatgcagattattaacacatcaaagaaggcaaaggtcagtttaaggccctttctctcaaaaaccaacatctgttttcttttgagcagcgtctgcagcaatccagataaatgtaaataactataaaccaactataatgccctttataggatgctgtttaaaaatccatccttaatgctgcagagagacatttaaacaatctgagatccttagagaggaaaagaaaagtgaaccaacatctattcacctaaaaaaagagaaaagagaaatccttgcccaggaccattttaggcaacacaaccactccactgatcagcaggcaaaagcaaaccagactgccagcctcttagatttacatatcattttcaacccacgttgacttctaattacttcacatacaacacatgttcctcccagcatgcattgagtggttggaattgctattctttgaaaagaaattcaccagcatgaggatgcatcacagcagttgaaagttatttcaccataggatagggaaaaacaatcctagagtgagactaattgccttgtgcccagggaaagatagaggatgaatcaatacttcaggtcataggatgatgattaaggtacatgctgtagttgtcttgaccatttgttgcaccatggcggtgtgctgctttgcctgtgtttgccctccaaaatccactatccactcttcttgtcctgccctgtgccctcagataatggacccctatggactgcatcacctggttgggttaggtcaatgggagtcaccggcaggaaaatcgaggcaggatagagagagaggtcagtgtatctcttctctgctccctctctcctttgccattagagttctggcagtagccacgtccttccatgatcatagcacttgtagagcagcctctccatcctagtgccatctctcagggcctttgaaagaaggagttccttctctaactccttcaggccaaagggaggagctgcttcctgctgtcattactcaccaggtgcctcattctctcttatggggtcttttaaccccatctacacctccctaaggaatccaaagttccttcatttgaatcatctgatttgaattcagtttgttgccaggactcagatggatatagcctggaactgtgtaactgaagtacctggcatggagaccaggacaaagaaatctctcaataaatacttgttgaatgaatgtgttccagcttcccttgcagaaagtggcagaaaaatgcaagccagagtgacctgtaccctgtattccatagctgtctttccctatgaatgttaagcttatcaacatcccttcctcctgccaacctacacatgacacaattggcggtgtgtccacctttaatccccaaagcatgcatccccccaccctggcccaaccactcattcaacaagtatttatagagcttcggctgcatagaaagcattttaacaaggtgaggtccaggacattttgtcctgggattatttaggttgccctttgacataacatctatgcaactctatctgatggcaccttgaaagcatctatggaattttttttttttttttgagatggagtctcgctctgtcacccaggctggagtgcaatggtacgatgtccgctcactgtaacctctgcctcttaggttcaagcgattctcctgcctcagcttcccgagtagctgagaatacaggcacctggaccacgcctggctaatttttgtatttttagtagagataaggtttcaccatattggccaggctggtctcgaactcctgaccttgtggtctgcccgcctcagcctcccaaagtgctgggattacaggcgtgagccaccgcgtcaggccacatctgtggaatttcaaggagacactgagttcacctaggccaacattgagtcttggctctgtgggcagcaggccattagaactagattggtgtccaggaaaatgcaggttacactgatgtttacattaaaaggaaaatgattgtgaacaaaaaggaaaaaagacagggagagggaggggaaaggtgtaagtagttacgtctccatgctttttagtagttgccattaataatgtatttctcatatactccatttttatatagctgtctttggtcctctgcatggtttaaaggaaggtttcagagatcaatactcattcgagttgtaaaaattggttttctaccatatctatctttcctcctctctctctcctccacgcgcattctttaggcaatcttatttttggcacaactacctgaacatctgaaataggaatctccatcacaaccttgaagtgaaaccgtttgctcttgtataggtgaaagaaaatgagctctttaaaccaagacagaaaagctgcctttagagctccacatagagtctcctaactgaggcaataggatacgtggagaggaatgggattatctcctccggaaagcatggtttcaacctaatgcagaacacgcaccctcccccttcccctcagttctgcgcaactgctcacaactgtgctgtttaaaaacaaaaaaggagggcaggcctgggaggaggggtgaggcccagttatgcaaatgaggagccaattagcagagacaacaaaggggagatgcccgcctcagagtgccaggtggcagcaaggtgctaacaggaatcgggctgattaaaaccagcgctgtaggaagttttgaaaaatgttttcaacttctgccaaggcacggctaaaagaagcattagcatcgtgcaacatgaggtgactgcctgaacagcccacctgctgctcctcaggcatgggttcttacctctgttgttgaaagcaccgtgtcctcgtcaaggctgagcacggcgtctgtgatgatgttgtcgtagggcagaaaacggctgctcataacctgggaggaagtagaagtaggcagtggggagggaatgagggaaagaggtaacttcagagtcttgttttcaggacaattctcccatcctcacctgcataaagaatgcgctactatcatgtcacccctcaacaccgaaggaatctcatttcccatcaatgcagatgtatttgttcaacaattattgggcacctactgtgtagcagacatcttgcttgtcaaagagggtacaaagataaatcagacatgttccctgtctttgaagagttcatggtctgtagaggagaccaagaagcagatgaccagtctttgcttgatacaaaaaatgccaggagaccacaggatggagcaactagctgtctggaagagcaggtgaaggcctcatagaagtgacatttaagcaggaccctgatgggcagaaagaattcaccaggtatagatagtaatgaagtattaaagacaagacttggcagatgcagaggcactgagcagagaacctgcatcctgacacccactcttcccaaccgaaagagtgaatggatggagaagtgattccaagtgtggacacaaaccacggggagagcagatcactgtagaaagtgctgcttttacaaattacaaacatttacaaattaaaatatgtattagcacagattagaaaaaatatatacacatatattagcagctacagcaatcaaaggtaatattaaagttacaaataacttcattaaaatgagaagtatactgatttaaagaaatatattaggccaggcgtggtggctcatgactgtaatcccagcattttgggaggctgaggtgggtggatcacttgaggccaggagttcaagaccagcctgaccaacatggtgaaaccctgactctactaaaaatacaaaaattagccaggtgtggtggtgcatgcctgtggtcctagctacttgggaggctgaggcaggagaatcacttgaacccgggaggcagaggttacagtgagctgagatggtgccacagcactccagcctgggtgacagagtgagactctgtctcaaaaacaaaaaaagagaagaagaagaagaagaaagaagaaggaggagaaggaggagaaggaggaggaggagaagaaggagaaggagaaggagaaggagaagaagaagaaaaaatattaaataatagcacatatgatccatggatttagaaaaattgtgaaggtggtgtatgcataaagtttgggcagttctggaataaggaaaggtggactacgtgtgcacacacagtggtgtgtgtgtgtgtgtgtgtgtgtgtgtggtgggggctttggagattatggcatcagctggaaaaattgagggtggagaggttaccctgtgatagtcacaacttaaacctttgtgttgaatgtaccatagaggaactaaccataagaatgctgacaccataagaataacattttttgaacatttactgtgtgccaggatatgttgcaagtccttcatatatatcatcgtgtttcatctttataacaaccccattttacagggagggaaactgagatacacaggttaagtatcttgcccaaaacggacccaggattttcccccagatggtgtgactctatagagcaccttggccaccgggctgtatctgaatggaaaggacctcaaaagtgaatttaggaacacatatgccaatcatatgctcatcaccttcttccagaagttatagtaaggatgatgacatcctctctgaattcacacctgccatcaactttgaagagacaaaggccagggaaagaagcaacttaacactgcagacaaagggaaagaggaaaagggaggtacctagccagctgccagagctgcagtctccccaaatctgagtacccctaggagccagctcatctgcaggcctcatctcaaactcggtttctttgccggcgaagctaccagagcacctaggactttaatgcatggacagtggccactctaactcatctccaagagctcaagggacatagctgtagcacacatggcttcaggggttgctcctacacatctgtcaactgggtcaagttttttgttgttgttgttttctttctcaggcttttgaaataaaacacaaagtgatcagcaacctcatagacacagtgctcagaattctcagcctgaagcaatcctcctgatactgtttacatgtccactgactaacgcagaaaccattagctgccagcttagcactgccctgacctttcccttgttaagcccacaggggaaaactgcaaagacaacgcctataaattcaaaacagaatttttcagccaaagcagcaaatatattgcttctaaattcatggagatagagattttaaaatggagaatgaggaagatgtagggcttcttcctcatcatctgcccaaccacaggtcttaaaaggatctgtttcctttttttctgaacctgtttcatcaacagaagtaaaaagcccataagccatccattttcgaattctcatgcagaaatgagaggcttttttcaaacacattgcctcagcgaccttcttaaatggattagcatgagagaaaccaatgtatttacaaagttaaacctgagtgaactgggttttccttgt

SEQ ID NO: 27 - DNA, 171247 bp, Homo sapiens
gcttgtatcccatgctgtctttgccacttactggctgtgtgatcttgtacaaactacttaattgttccaagtctcagtttcttcatctgtgaaaaatgcataaggataccaccaatgtctatatgccttacagtgttcctgaaaaatctaaatgaaatgtgaatatttctaaaaattggactgactatacaaagataaaatattattatctcctagaaaaaaaatgctgtaaccattataggctattttatcccctactacaagttagtttatgagacacaatccaccaacataagtacatctaagacagacaatttttggctctagagaaagatcagaaagggtaatatggttgtaaaactgaggacctcagttagccaggcatctatgtggggtgcttgggtgtcagtgagaagtcagggagacatcaaataggagctgaaccttttgttgtttcctgatgtgaggcctccctacagggaatggagggcaaacttgtaatgacttacaatctttgtatcttaaaatgttagtcctggaaaggaattagagatcattctagttcaattctttcattttacaaaatagaaaactaagcctccaccttaccttgaaaattcccttcttcctgatgcttagaccaggattatttccattgcacaccatctccaatatgcaactagttattaaggtctgtgggtgcacttgcattgaattattactcatacccacatcttcctgacctgggtccaaacccccaacattataagtttggactagtacaacaatctcatagtctatcttcctctattttttttctgacccctaatcttctctaaacactgatcccagattagccttctaaaagtgtccactgaataatgccttatttgctcaaaaacccattaatggctgctgtgtacagaagagtggtagcaatacctgcctgccttatctgagttatggtatattctctgttcctaaggggatgacactgtatgccatcatccctagtgttccagttctagaaagggattgacaaaaatgataaatgcaccactttcctgggtttgctgttcatcttaaaaagaaatccaattacagtttgcaattgcattttggtaaaacataatgagctctccttggagttgccttattcagatcaaattacttcttggtaatttaaagtacattacatctcccagatacctctcaatacacccacagtgtttgaggccttgtgtaactattgcacaaacactggccagtcaactctagatgagttcataaccaaaggattattacatgtttacccacatacaagtcactcttcatttccctcatgcagggaggtcaaaggtcatgtaactctgccagagcaagttacttctcagggactgaaaatgagagttaaggagagctttcttctaaaaacattactgcagagaggtctaaatgtgtgtgtatgaatgatcaacattatcagtcaatgaactttctcggtcagttactctcatgtattgacataaatgacactgagccatctgatgactaataaaaatgacaaaccctgaaacattgaccaaaactcacaagaatgacatttcctaaagcatttccatttatagaaaaagttagaaaaaagcaaagaggaaaaaaaagtatatgatgagaagctgtaacagtaagagaaaagaagtagacctgaaactttataaaatggcacattgtcccctgatttctccaagaaagttcaatatgtaaaatgtcaacagatctgggtatcactaaaattttctccactaatttctacaggccagaaaggtcatctaagactttaaaagtgcagaatgatgtaagttttcgggagtattattcagccaagagtctcatcaagatagctcccccccactccccatgcaatgagaacaatagccctcaagagcttttactcttgacatttgcacctttatttacaagatggtatgtcatttgggctttataaactttacatttatcttctttttgtttgttttttcatttttctctttatacacactatatcaatgtatatatttagaattgtttttctttttcttttattattataccttaagttctgggatacatgtgcagaacgtgcaggtttgttacatacgtatacatgtgccatggtggtttcctgcacctatcaacccgtcatttacattaggtatctctgctaatgcaatccctcccctagcctcccacccccttacaggccccagtgtgtgatgttcccctccctgtgtccatgtgtcctcattgttcaactcccacttatgagtgagaacatgcagtatttggttttctgttcctgtgttactttgctgagattgatggtttccagcttcatccatttccctgcaaaagacatgaactcatcattttttgaggctgcatagtattccatggtgtatatgtgccacattttctttatccagtctatcatcgatgggcgtttgggttgtggaatttaattaaactaaagagcttctgcacagcaaaataaactaccatcagagtgaacaggcaacctacagaatgggaaaaaaaattttgcaatctatccatctgacaaaagtctaatatccagagtctacaaggaacttaaatgaatttacaagaaaaaaacaaccccatcaaaaagtgggcaaaggatatgaacagacacttctcaaaataagacatcatgtggccaacaaacatatgaaaaaaagcttatcatcactggtcattagagaaatgcaagtcaaaaccacaatgagataccatctcatgccagttagaatggtgatcattaaaaatcaggaaacaacagatgctggagaggatgtggagaaataggaatgcttttacagtgttggtgggagagtaaattagttcaaccatcgtggaagacagtgtggcaattcctcaaggatctagaaccagaaataccatatgacccagcaatcccattactgggtatatacccaagagattataaatcattctactataaagacataggcacatgtatttttatttcagcactattcacaatataagtttttattaagaaaaaaaacagagcctctctgtaaaattaatccttggttctgacattagctacctgtatattcttttttttttttttaagaatatttctttctttttttttaggttttgtgagggtctttttttttttttaacttccatagattattgcagaacagatggtgtttggttacataagcaagtcctttagtggtgatttgtgagattttggtgcacccatcacctgagcagtatacactgcaccctatttgtagtcttctatccctcacatttatcttctgatgactatctctatctctgctagttttaagaagaagcctaggggctgggcacggtggctcatacctgtaatcccagcactttgggaggccgaggcaggcggatcacctgaggtcaagagttcgagactagtctggccaacatggtgaaaccccctctctactaaaactacaaaacttagccaggtgtggtggcaagtgcctgtaatcccagctacttgggaggctgaagcaggacaatgcattgcttgaacccaggaggcagaggttgcagtgagctgagatcatgccactgcactccagcctgggcaagagagcaagagtctgtctaaaaaaaaaaaaaaattaggctggtgtggtggtggatgcccataatcccaactactcaaaaggctggggcaggagaattgcttgaacctgggaggcagaggttgcagtgagccgagatcatgccactgcactccagcctgggtgacagagcaagactccatctccaaaaaaaaaaaaaaaaaaaaaattaaaaaaaaagaaggagtctagggtgtgaaggatctttgcacaacagagtcaacttcccttgtactgctcgaatcacatatataccatttctgatagataatccccaaatgatgctttaacatttccaatgattggcaacatccattgttagcagccttttgggcagaagatcaatttgattccaaattaaatttgtgctcttttctgtctacagaaaagaaagcaaacaataagttagcaatactgtaagttggagagtcgcaattaggtgactcctagaaacagaaaaataaattgccttctatgactcagaatgcaaaatagaaactacaggtcagaacacatgtatatagagaaacttgatggagacaggatggtttctaggccaaaagaaggttgcaggaacctatctgaatgtataattgtagtttttagattatgtcagtcttgggattgggggtaaagaaagagatacataagttggtacataagtcattcaattatgaaaacaagcaaaaaaaggaagtcaccagggccaacattgtcagtgcccagccaaacaccgtctagggagaagagggcctttgctattagagcattttaatctatagggcaatataattccagtggagatggataaagactggattttcgatggctctctgattcaattaatttatgataaaatagaaggctaaagttaacataccttgatgatataaaatatctgtattatcttgttccctctgccaggatcatcagttagacccatctctatctcctttttgactggctcatgatgttttccctctcagatctcagatgtgaagtcatttcctccctggaagtcttttccaatatacctaatccagatttgttgattctcctatatatttgcattgcattctgcacttcctttatcctatccctccttatctagtatatcattatctgcttttaggtagttaagtatctccttaagattcctaatatcagggcctacgtattacagaagtctggtccatatttgtatctctcaattttataatttgcatgacaaacaacttgattctttccaattctatttgcaagctttacaaagtttcttggggaaaagaagaggtgggatgggcatttgaagttgtgagttaatctgatcattaaaattatgaatataaaaaaattattttagcaactttcaaaggttctgttgaagacttaactgcttttgctgcgtatacaacctgttagaaaagaaaatgaatgaaagaactgaaaaacgctctcccaaattaccctataagaaaggatgataaattttaaaatgagatggtagaaagaatgcaatcagaaagcaatcaagcaggttccactggtaaggaatagagaaacgaatggtaagaattagaagacgagaaggtaacgctggaggaaagatgggtagagaaagcacagcagagtgccttctggcaaagaaatgtcaaaccttctgatgacataggaccattttatgctgactgctaataatttaaaagatcatactttaggaaggaatgatgctagttcctcaaaaaggaagaaactcatcaaggtagtttgtaaagtctaatgggctcagacctggccgggcaactgggtgggtttgtggtcttgaaacatacatccaggatgtggcaaagagtctgacaagactcagcaagcccacaaattgctactcacttttgatgattaactgtggaaaaatgacaaagttgggggaaaaaactgaaatgtgtctctcaaaattccatggttttggttagaaatcaaaagatgagcaacgcctttatccctctttatcccttcttccagttatttttgagactgaagaaagaaaagaagacttcaaagtttaagctacacaggacaaagacagtgcccactgtgctcatcaccataagcccagagcctagtatggaacctggaaaacaagtacttctctgattgaatgactgcagacagtgaataaatggctacatagattatataaaagacgatgagtttgtttactggtttaactatggtttaagtttttaaagtagaaaggcagaatacaaatggggtaaaaactgcaactccagatttcagtgaggacagagtttaaagagtacctcattcgtttaataagttttaatcaataatacaaagagaattgcattctggcatactaaagaaactcacaggtataatctcagcatgattgctaacattcaaggaattatgaaaaatgaaagaggcttcaaaagtatagagataggaaaatattactgagaatattagaagtggggaaggtaagttggatattagaaatgacaaatagataagtttgatgttcatctataccaaattaacaattagttgttttctgaacatctagaaaagatgatggtgattatgaggagccatcagtaaagaccccccaaacaattctaaaattagcttgaaagtatatgtgtagcattattaatgaatattcttaaaatagctatgaagagaaattagacttatgagatctgttttaaaactttttaaagcagtaataatggaacccatatggtaatatttcaaaattaagaaactcaatccagggaacaggataatttaacatgtgatttaaaagatactgctataaaaaatggaagtaggaaataccatatgatatatggggttaagataatagtaacaagagaaaataacatagatatgtttcagtaaattccaagaatcttaagtgttttaattagtcaaataaatccagaagacacagattaaacatttataccattaagaagagatgatcactttggagagtttgagtaatcaaatatacattttatataataaatatttattaagcaactactctgtagcaggtactattctaggtattagagaattactggtgaacaggatatccagggtccatgctgccaagaagcctatattctagaaggaaaagacaggcaatactaggtaaatggattaggaaagaaaataattctagagagtgatcacatattagagaagccattataaaatgtacataaaataaaaaagaaatataaccaaataagaaaatatgtgcatcaaaaacgacagaaaagaacaattccttaataacctcagaacacatacctatatttttagaaattacccttaggattccaataactaagtgatcatgtctcaaacaaacaaaatttacacaagagaaaatacaaataggaaacaaatgtctgggaaaatgttccaactaacatgtaatcaagaaatgcaaatttaagcaactttttaacatctgctaagtttaaaaaaaaagtttgaaaaaataaaaaccagacttacaggaagaatgacaacataaacgtagtctctgctcccctccaggaaaacggctgaaattaccaaagtggagggagatggggtgggggtaggacatcagccgtgaaccaggaatggtgccaaccacatgtcaagcacaaagtgaggaatttctaccagtttcaataccaactgtaaaaaagaataacaacctttcctcaatggcagttgcaagaaaggagagaaggaaactatggtgaaattcatcagcaggtcacaagcagatgacagacggccatatgtggagtccttctccctatgcttggagacaatccacagctctggtgtcaaagagaagagaaagcaacgagccactcctagccatttttcacatatgtggcaacttactagtggaggtagtcagttgaatatgggctggtgtggggtgtggggtgtggggtggaatttctgtaaggtctaggcatcctgttggagagatgaggattgatcaaatataaataacagaaggaaaggcaggtgtttgggagaatacacttctagccacatcattcaggaaacccataggccaaagactttttctcataaatgaattacttctagcagtgtttctttgccctaagcctgaggctcaatacaggtctggaaagaccttccccaagtgactggatacacctccagctcagtgaggccaccccttctgcagaagtttcaacagagaaaaattatgccaagtacccaggttttcaatgcccatggctcaagaagcatttctatcattttttaggtttgaatgaagacatatttgctcatatgatgttgcctcatccatccctccacttactttctatggggaggagcccagtggtacccaaataactagagaagaaagattacctatttgcattatttaggaacaaatagcaagcctgaatagaacttctcacagagataaataaggagaaaacaccagtatggatctaaaaagacatcacagagtaaggggggactatttaagcatgcagcatctagaatcagaatcccagctctaccatttactagccatgcaactttaggcaagataattaacctttctatgcctcatttataaaataagggtcatcatcacaaagattaaatcagtatgtaaaatactttcccaaatatccacatggtaaatgttaggtattgctatcattgtccctattttattatgtctaagcaaaaaaaatgcaattaataaagacaataaactttggatacatcattaatgctttttttaatcaaatatttctggctagtcttccagacagatgtactttctgtctcctttaagttaggcaggatggtgtaacttgttttgatcattaaaatgggaattaaagtcatagtttaacttctgggagctaaatcacctgagttcaggagttcaagaccagcctgaccaacatggtgaaactccatctctactaaaaatacaaaaattagaattagcccagcatggtggcacacacctgtggttccagctactcaggaggctgaggcaggagaattgcttgaacccaggaggcggaggttgtagtgagccaagatcgcaccattgcactccagcctgggcaataagagtgaagcttcgtctccaaaacaaacaaacaaacaaacaaaaagttggtgtgtgaattcatcaagtgatttctttctcaatcatagcaaccttctacatggtggcagccccatcagcttgtatgctgaagtgaagataacttgaagcagagccccaatcaatagctaaagcatgagtgaggaaaaaaagctttattatactaagccactaagaagtcaaggttatttattactgcagcacactgtagcctatactgactgatacagaagtaaaaggtaaaaaagaaaatgttttcaaaaacttacttccagaaaacagtagagtgttttggacaataattgctgtatagacctagagacagtaatgataaaataggcagatgaagcaacagctgaaacatgacaagtcgagatatccaaatgagattaacggtgaggcagcaaagtcaaagaaaaaacgattgggaaataattgtggcaaaagcttgggcaaaactaaaggatcatgtatcatcatgttgaagttaggccctacctcacagtttagaaagaatcacagagcttttatagcccaaggattgctacaaaaatgttcattgaagtgtttcttagagtaattaaaaaaaaaactgaaggaaatctaacaactaagagtagagaatttgttcaataaacctgtgcaaatctttgtacctttataacatcactgtccaatagatctttccacactaatggaaatgttctatgtctgtgttgtattatgcaatacagtagccactaatcacatgtggttattgaacatttgaaatgtggctggcatgactgaagaaactgaatttttaaggtatttgatttaattttaatttaatttaaatagccacattggctggtagcttccaaattggacaatccatattttttttcttcaatttttgttttaagttctggggatacatgtgcaggatgcacaggtttgttacataggtaaacatgtgccatggtggtttgctgcataggtcaacccacgacgtaagtattaagtccagcaaccattagctattcttcctgatgctctccctctcccacatccttctgacaggccccactgtgttttgttatccccaaagtgtccatgtgttctcatcattctgctcccacttataagtgaaaacatgcggtgtttggttttctgttcctgtgttggtttgcagaggataacagaacagcccatatttgaaacgatggcatagatctgtatttgttagcaataaaaatgttcataatttattgataagatattttagagagcagttaaaattaacttatttgtgtgtgtgcatgagtgtatttgtgcaaatacatactaactgaggactccacaccaaaatgtcatcattgggtactggataatggcagtatggatgatttttctttcttctttaaatctttttggactgtctatggttttcaaataagattgcagtactcttatatacagaaaagtaaaactgtttttctttctttttttctttttgagacagagcatccctctatcgcccagactggagtggaagggtatgatcatagctcactgcagcctcaaactcctgggttcaagtcatcctcctgcctcagcctcccaaatagctgggactactacaggcacatgacaccatgtctggctaatttttttttactttttattttttgtcttcctatgtagcccaggctggtctcaaactcctgagctcaagtgatcctctcatcttggcctcccaaagcattgggattacaggcataagaaactgagcccaccccccattttcatttaaaaaaataaaattattgaaagctaatgcttgtaatgctgcaggaaaactgttgatgttattacaaattgatataattattttgaaaaatgttaaatagatttccacctcaaaaatgtattttaagataactctcaaaagaaggaagaaagatttactcaaaaatcctgtccctagggaataattatttcaattattttgcaacagattaattacaactctcttaaaatgtgtctgcagattataacagaaagtgaaaagggaatcatgttaaaagctgatttaagacagtggaaagttatctgtttttattttcctttaatattttaatactactctcaataaatctcaataaatctctgtacaagggccagtacatcagaagaataagcagcgctaaccactaaaacgtaattccctggttctcagtgactcaacacagttgaggtttagcagttgtttacatcatattctgatgcagtgaagccgatgccctggacagccatcttctgaatggtaactgttttcatcccttggcctccacagtcatcatgaaagagaggagagagcatggaagattgtgcagggagtttgatgaccaggtctcaaagtggcttccatcacatctgtttacattccatagaccggcatctagtcacatagcccagactaaactgcaaggaatgttgcaaaacataatccttctctatgcccaagaagaagaatggtgtctgggagcattctagccagtctctgcaaaacttacatcaaaccaaattcatttgctttcttaataagtttattaagcaggttgatggatgctgctattggagggcccaatattatattttggaattaaaaaaaatacaaatggccaacaggtatgtgaaagtatgttcaacatcactaatcaccaggggaacccaaatcaaaccactatgagatattatctcatacttgttaggatggccactatataaaaataaaagataacaagtactgtcaaggatgtggggaaattggaacccttgcacactgttggtgggaatgtaaaatggggcagccattatggaacacagtatggaatttcttcaaaaaattaaaaatagaacaatcatacgatccagcaattctacttctgcatatttgtctaaaggaattgaaatcaggatctcaaagagatatctgcactcccatgtccatggcaacattactcacaatagccaagatgtggaaacaacgtaattgtttatcaaacagattaacagataaagaaaatgtgacatgatatccatacatattattcagccttagaaaaaggcaatcctgtcatttgtgcaatacagatgaaacttatgggcattatgttaagtgaaaaaggctagtcatgaaacaacaaatactatgtgattccacttacatgaagtacctaaaatagtaagacttatagaaggacaaaatagaatagtggtttccagggtcttcaagaagagggaaatggggaattgctcaacaggtataaagtttcagttacgtaaggtgaataagttctaaagatctgctgtataacattgtgcttatagttgacaatattgtactgtatacttcaaaattgttgtgttcttaccacaataaaatttttaaaaatcccttcatatcactcttattcagcatcatactgcaagtcctagctagtgcaatgagacactaaaaaccacagataatcaaaagcataacacaataatgacataagcttataccactcagaatcaaccattcttaacattttgtcgtataacatttttgctataatatcatattgcattgtatatatcactctgcacattgcttttgtcatcaatgtgttttaagagccagtgttcctacttagcattccagttcatttcttttacttacagcaatatagttcattttataagtatactatatgtatctatttacctgttactttatatcgtggttattcccatttttctctataaccattctgcaaggaacatccttcagcatgtctttttatgcagatgtgaaatgacacatgcctagaagggaaattgcaagatcaaaaacactcatttttttgaacattataaacatgtataacttgtagacatgaatgaaaatataaaacacatgtatatcaaatttgtagatgacacaaactcagaagggagagatgttatgataaatgacaaaaatcagtgttcaaacttttcataagtgagaatactgggccataactaagaagatggaatttaagaaagataaagataaaatcttgcatttagttgaaagaattaaatgcccattgcaaaaaggccgcgttattacttgacagcaatttatttgaaaaatgtctgggatgttagttggcctcttctttgctgtgagctaacagtgtgacactatttagacccaaaaaaatgtagaaagacagtcccagatttatgatagttccacttaactatttttcaactttatgatggtgcaaaagcaagacacattcaggggaaaccatactttgagtacccatagaatcacggtttttcctttccagtcaaatattcaataagttacataagatatccaacacgttattaaaaataggctttgtgttagatgattttgcccagctgtatgctaatttaagtgttctgagaatgttaagttaggctaggctaagccaagatgtttggtaggttaggcgtattaaatacattttctgcttacaacactttcaacttacaatgggtttatcaggacataacccctccataagttgagaagcatcgtatttatacagctatattcatagaagaaagttttggagggtctcaacgttaaccttaattttattctaccaagtcataactctatagtgttcaaataaaaccaacttatattaacataaggaaaaagagaaagcagtcgtttcacatactacactgcagagaggatgggtttggagtaaggctagaagtaaaaccagagctccaaacgctgctgcaactcatcccttttactgcctcccatcaatgtatctctctgcctactgtatgtattctctgagctaccaaccacatgaagctggctatggcctaaagaagatctagatcggggggtccaatcttttggcttctctaggccacactggaagaagaattgttttgggccacacataaaatacactaacactaatgatagctgatgagctaaaaataaagaaaaaaatcacaaaaatatctcataatattttaagaaagtttacaaatttgtgttaggccacattcaaagctgtcctggtctgtgggttggacaagcttgacctagatgatcctcatctgcagcttcaattcatgaactcccaggaggggtctctgcttggcccagcacaggtcttttgtcaactcctttgacaaatcaggatggcagccaacttcagaatcaatggttggaacaggagaggtacaacctatagatagccttaggaagattgtagttgaccaggaagcccaatttgtatcttccaaagttattgtccttcatcttggagtcactgggtatgtagttatctgcagacatgcttaaacacttaacttcctttgcttagaaacctctcctgattctgttactcttaggctgtgtggtcaacatcacataaacagtgagccctcgatatttaacagacaaataaacccaaatacatattttattcactatgtgatttttttttcctcctgggttttatatttttaagattcataaaaataaaatagttacttatgtatcatggcaggtatcaagaaatgtactcccatcagctgaatggggcccttgtaataattgcagcagatataatcagtatgcctgcctaaactgtgagtctggatcattaccaaacttgatagttactgagctctgactgtgtgcaacactataggtgtggatctacactagaggatttaaaacctcacagagccaaccaaactgcaaacaactggggaagatggatcacatgcagaggaaagacttaatcagctgaagtttctgagtagtagtccctgattatcatcacatcttaagagggggccgcaatagaatccagacaagaaaaggatattcagaataagtgagatttccaataagacataaaggagaaaaagcaatttggctaaaaagagaaagagacctaggatacagattcccatttggagtattttgctgcacactttatatcaggggtctaaacccagactcagaggcagaatcgtatggaaaaccgacaagatcaggatcttgggtcctaacttgaaaaattcttatccaattcatctgagtggagttttgtgatttatacttttaataataattgtagctgataatctatagcacttactacatggcagacccttcatttaagtgttttatatgtaatattaactctctaagtcctcattttagccaatgtattaggaactgttattatcatccttaatgatgtgaaaactgaaacccagagaagcaaagtaacttgactaaggccatgcagtgttgggatttgaacccatgtagttgggcttcagaatctgctaatcactttgttctgcagattctcaaaaaataaaataaaataatgactatgaaacttgcaggcaattgtgatgaattcagtgttgaaaccactgcattctaacacattcaaaaattattatgtactgagcactgcttcaggatagaggctctattattcaaagcctggcatatagtagatacagaatattgttggatatattccaaacagaaggagtccttagaagcaagattttgtatagggaaatctgttgggcctgcctgctaccgcagaaaggaagtggggcaaactgagtgactcatatcatgttttctgtccccattataagaaagtgccaagaatcagaataagagacgcatcattctgaccctacctttaaagctctgcccagccccttaaatctgtgccgcttatgcccacacactaccttaattatttggagaaacaagactttcaacttttctctttcagctcatccttttcttcagttccatccttttttttttttaaagtggtgtgatcatggcttactgcaatctcagcctcctgagttcaagtgattctcctgcctcagcctcccaagtagctgggattacaggcacatgccaccacacccagttaattttatatttttagtagagatggggtttcaccatgttgatcagactggtctccaactcctgacctcaggtgatccacccacctcggcctcccaaagtgctgtgattacaggtgtgagccactgcacccggccagttccatcctttttagaaacaccatggaatattaagaggatgtgaaactccaagcagttgatttctctgcttatttaaagtgaagataaatggcttgtacatgataaatatttttggatggatggatgggagaattaaacaaagagaattaaacaaagaattaaacattgaatagaaacccagtggtagatcactgtccatgtctcctatgggtctgtcaggactggctgtcttactggtaacatgcaatacggtgttataattaagtgcactgtctttggattaggtggcttaggctcagtcctccttctaccacttactagctgtgtgatcttgggcaagtgacttgtcctctctaaacttcagtgtattgtctttaaaactagaaataataatagcacttaaactaggggtaataacagcatcaacccacaaaggtgttgtgaaataatgtacctgctaagtacaatgttcaatgcataaaaatgcccaattaatagcaattatttcacaggaaataatatcaggtttggtggcttgaaacttgccttccaatatcttttggggtaaaacttgacaggcatttttttcttccaaaaggcaagactttggggaacatgagaggcaaatggcagattttatttagactggcaaggaagaaagaaagggagagagggaggaaatataaaaagataacctttcctcttctgaaaatcacacatcaatttttttttatacaaaatagggtccttctctatcatccaggctggagtgcagtggcatgatcatagctcactataacgtcaagctcctgggctcaagtgatcctcctgccttggcctcccaaagtgctggaattacaggtgtgagtcatcacactgggtcataacatttctttatattcatgtgactccaaaggtttagctaccagtgatgaagttatcccaattacaattcttagacaggaaaggaaatgcagtcaacttctgagaaaatgggttgactctctagaaagtctggagggtgtaaatggcccatgttctgaagagggaacatttcaagcttatgagctaggctcacctcaaccaaagagctcagctaatacaatatatccttagagcttagtttgtttctggacatttggattatttatttatttaagtatttattttagtgcatcagaatcaatgtagtacatcagaatcaatgtagtacatcagaatcaaagaattgaactaaaatgaaaatcaaagaattttagtgcatcagaattagtatagcactttgaagttagacaaaccttaatttgaatcccagctctaacatttaatagttgcatgaccttgggcaaattgttgacagctgtacacttcagtgtgtttgcgtgtaaaggggaggtgatactgttaccttttacatccacatgttgggatgattaaacaaggtcatatgtataaagcactctattcaagacctgacatacagtaagcactctataaatattggctatacttatgtctcattgatattattattttcataatgtttcttgtctacttccttaatgaagtgcgtaatactcttcttgggcattaacacaggctccacctggcctgtaagtgaaacagggagagccctaggcttttgctttgttttgcacagagcctgcacagagcccacccaagtaaacaaaatctcctcttctttctctccattttaatttttcttttattccatgccctatgaatagattagtttctttctctctctttgccgaaataccttcaggcctcctctcctcccttcaggcaaaagtccttaaaacctccactttcccccagtaatatttttctccaactaactggaagtggagaaagattttcctctttgtctagcactgatttttgacttgtaattccatttcaacaaaaccacttgcactaaagcttacacacaatgtaaataattcattagaaatatatatttgcttgatgcttatatacttgcagtgcatctgcagagtctattgtatcagtcaaggaaataacaggactcccagtcaccaaggtgaatggaaaattttcctctttaaataggtaaaaatttaagttgcatgcaaattaatcttggaaatacagaatgctaacatagcaggggactttaaaatgtgtatattctaacactctctataaatgtggaaaataagtcccagagcatggtaacatggccataacaggccttgtagcattctggaatttaaaaggctaggtgcatagaagggaaaatagatacgaatggcaaaggcaggtacataatgcctaaaaccaggatgtggtgtagcagttaccatcgtcatcatcatcatcatcacaatgacaatcaatggtaatggctacaatttgggaattatgatcttggcactaagcagaggtctttacatttatctagaaagatgaccatgggtaacactgcataagactgactgatttagactttgagaattttgccagttttgggtggctgtgagatatcttgtctgaccatagggctagatcatacagctacaagagaaggtgggatttcttcagaagggaatggacattgccactgtagttcatcccaggcatttttcaacctggaaagggaatagctacactccagttagaggtcctaggccaaggcaaaggagaatctcctgccccactctggcaccgagaaccagtttggtttctactccaaggatgggtgatatctgaattcctccctgtgtggtgggaacctaccatgggctccataagagcaggctaggaataaggttcattgaaggatgccaaataaaaaatcttgtggcatgtataagttgtcctctgtggtgtttttcagttccatgccccaggacttcaagacaccgatctgcaattgtgccagaggatgttagagaggcaactatgcccttgcttgggagaaaaccacatgagcagaccatgtcttttcacccaaggccagaggagaggaagcagaagacacatttcccggtgcctgattattccttcctccagggcttacggttgtcattttgggccatctcacatagaagaggtacccaaatgtttgtcatctctccctgaaagcgtgtctagtcctcaaatagaggaaagccatcactatctctctgccttctccatcgagaccaaaaaggaagatacaagctgggaactagatttgaatatttcttgatactggagaggggcagggtgatgtgatctctggtgagtttcctcctcaagcaggggtgcgggtagcctgggtttcctgggcccagatttcaaacctgtgtcagctgtagctgcacacagagtgcccagagctgttgggtgcagcttaggtatggcagtatcagtcatctccacacctgctgcagaaagtctcaggacagcactgtgagtggggctggggaatccggagaagaaagttctataagcacaacacggtttactttacagacagcttgctaccacataacgatttgggtacaacccatgaaaggagccccgcgggagtagaagagggtatctccatgtctctctaggagacgaacaagcaatatccactggaatccagaggctaaaaattgtgatgtcccaggcctaagctagacagagcagagaatgggcaggacttgcccctaaagtatgggcagttaaacaagaggaggaaagaagaaaaaaagaaaagaaaggaaacactaggcccaaattgatttaccggtgaattctaccaaatatttaaagaagaatttaaaccaactctacattgcttaccaactctttctatgaggccagcattattctgataaagccagacaaagacatttcaaaaaaaaaaaaaaaactataggcccatattccccttgaaaatagatccaaaaattcttaaaatatttagcaacaaaatgttatggtccaacagggctttgatccgaagaagtccaggagaaagagacaattcaggaaaagaggcagcaaaaggaaatgtgggaaacttggcccaaagaaggtttgaagcagacgatggatggcattgcctggaaaaattgcctgagtgtctgatcctaggggccagtgtttccctaaaggattcctacagttgagttcattaagattcttaggttgggatacctagaagaaaaaactgagacaaggattccagtgtgcatgatttacagagggattgctgtccagaaaaaacagctaagggagtgaggaaagaataaggaagagggagaaacatggcaaggatgtggacccagataaagtcagcccttgacctgacccacagggtgctctggagtataaattgcatgacacaattatcacacctggagcatcacctgcaccctgcgtcagtcagttattgtatgcctctggggagtaggagatgtcagctcccagtatcgctgagtgaggccgatcccgtcagcctagggtaatgctctgcagaagtctgcaggtggatgctgttggctgtggcactcactgcaccatcatagcagttgtaaaggggcttggagtgtggcaccaataacatctactgcggaggacttcatacagccactctcctccccctggacagttggagcctgaaataggcaatgatagcggaggtagttagatgaggtactcatgaactatttagatggtagaattgggaggacacgcagctaattccatatgggaggcagtgaggagggacagtgtttagctgatggacataagaagtataagattatactcatgccctggggaactggaggaatggtggggccattgtcaaaggtaaggaacatgaggaaaggagcaggacttggaaaggaacataaattcagtctccagcattttcattttgaaaagggaatcaatggcttatgaatagcatacctggagctccataggggtttcagggaccaattatattaggaagatgaggccagagagaggggaaaaaagaaaaccaaatagtctagtgctggccctcatcccatcctacactggagcacttctgctatcttggtttgattcccacaaatgcagactttgaggcaaggattaagacacattgaaagacgatctcacgggttaggtgtggtgactcatgcctgtaatcccagcactttgggaggccaaggcaggtggatcacttgaggtcaggagtttgagaccagcctggccaacatggtgaaaccccatctccactaaaaatacaaaaattaggtgggtgttgtggctggtacctgtaatcctggctacttgggaggctgaggcagaagaatcacttgagatccaggcttcagtgagtctatattgtgccactgcactccagcctgtgcaatagagcaagactctgtttaaaaaaaaaaaaaaaaaaagatgacctcaggaagcataggtgaggatagtgaaaatgaaagaaacagccaccaagggaatactcatgaatagattatctctgaagaccacaggggcatgatctgttggaaaccctctgaccatccatgtatcccacatgtttcccactgagggataagaagctattttgctaccgtgaatggaacctctttggttgagggtgtaagaaacccctcaatgccatgctagcttgaagaccagctgagagcctgtgtagaggctgcagaagaaaactagtgtgtagagaagcactcacacctcagcgggccacataacctggggcaagggatccatggcttctgctgcacctgctccactctgtttttccatatagcaatttctgaatttccatataagatatgttttttgctttgtttttcttttttaagagaaaaatctcctgtctagaaaaacaggttggtcagtgtcctaaaatcaaaagtccgcagcagaaggcactttgaacaagcagttattgcctcctctggtctcacctccaattctccatgtaaaattaatagtgtactctggggacatcccttccattatctagtcttggtgaaaagggacaatggtagaagcagggtaatctctgccatatcgattttctgtgtgagcttctttgtgcctccagggagacaccactgctttcagtgcctattagcagttgtgtcttttaacctcccggtcaggctggcagtgtgagtccaacaaaggctccggctccaattacttcgccagtacatagcctggctgaactggagcttgcggctccacatgctggaaattgcactttccaccaatacagagacaagcaaagaggggcattcaacaaatccccagctacagctcagcatggcagggaggcagaaaggacctatataccaattagccaggcagctatggccatcaatcatgggtgacctgggcacccagcatgtatgtccatcctggaccccaccaccgaaatcacactgaaaacttgtatccagaggaggcttgagacagccaaagctacaggtggcaaaagctttcattccagaaagcacttcaatcccacaacctggagaggaaggcccatacgaccagcataaaattaaaagtgtgcagtacttacaggacataattctatgcttacatgcatttctcagaaaattttggcaaagactgctaccttctgagcaaaactggacatagaaatgacaataacacatattgggtatttatcaccttcttaagagatgcatagccattttcctgtggctgagacagaggtctcttttaatacttaacatttcctttaggttggcctaatgcccaaagggaagctgtaataatctcccacatgtgagtttggtaaaaaatttcacaatgacaatttaattcactacttactgcagtccttattatggtctttgtacaacaggtaatatccctgttaatttgagaatcactgttaacctgaacctttcccattgttttcaaagctttctcttaagtgtcagaaacacacccaaatacacccaaacacacccaaacttgtattttagcccttctattgtgaatattcattaagggtggtgtgacatagtgcttcagagcacagctctggagccagcctgcctgagtttgattcctgctctgtcacttattgacctgcaacatcaagcagtttacttaacctctctgaggctcagttttaccatctgttagatgaagacaatagtgtctactgaatagggttgtcccaagagcacttagaaccatgcttagcacaaatgctgaggctacataatgctcagctcttcacttcctgcttctctggtcatgggtgttattataaaagtgcccttccaggagtttgagaccagcctggacaacgtagcaagaccccatctctaaaaaaaaaaaaaaaatgtattagcccagtgtggtggtgtgtgcttgcagtcctggctgcttaggaggctgaggcagggagattgtttgagcccaggaatgtgaagctgcaatgagctaagatcattccaatgcactccaccctggacaacagagcaagaccctgtctcttaaattttgttttaaagtgccctcgaattttgttaagacctcagaagctgctccatgagtgggtggtgcaatgttattggagcatgggggtcagtgaggagagctaagatttctgggaggccaacagaagggttagaatgtgcttcaaaatttagttgggcatggtggtgtgcacctgtagcttcagctacttaggaggctgcagtgggaggatcactttaatcgggtatggtggtgcactcctgtagtttcagctacttgggacgctgaggtaggatcaagggaggatcacttgagcctgggagcttgaagctacagtgagctatgaacatgccactgcactccagtctgggtgaaacactgagaccccgactctaaaaaatataagttcataacagtacataatagaggaggctcaaaacacatgccagtgatgaaaatgaaccctcgcttctgaagagagcactgcagtgtcaacaggtggctgcaaaggtggtgagcatgaccctggaccagggaggttaggcagggtcccagcccagctaagacttctttttggaaaccaacatggggtctgacaagctgtctcagtaatgaggctctgcacttttttcattctccccttgccagatggaggcacccccgtttagccatgctgctcccaggccctgctctctgagaaggacttggtcaaacactgcatctctggatcctgagaagtcagaccagttatttcagtgcctggacccttcctcttttctgacccagtatttccaaaagcaagtccattgttcagccttgaaaacagctgattgtgagagggagcttatcacagcccagcagactaagaaaacattttagagaaagaacatttggaaggttcattaaaatgctgaaaaaaagagcccccattttggggtaccttcagggctttctaacctttttggcaagtgagttgtttttttgtaaataataccttacatagggcccaaggtataaaatcaagtgcagggctgctctgttgaaggggggtctatagatgcttccacctccaaggagcaggctttggaggaaacagttctagtgcatgtagggacaaacagaggaagcagagactaccttcccaggggccctctcttggatgcgtgccctgcatttctgcagcctctctttcccttttctgatgctttcctctcattccatctgaaaagtcactacaagtgctagaagctaggccagaggataaagaccttgaagaaaactgagcctgacacctaatatgggattgaggaatagaatggaaagggggaaaatacagtggggaggtgaaaataacatccttagctgagaaatgacaggatgaacatgtcaaggcagtctcaacattttaaacgttttccaagaagagagtaagcagtggctcttgctaaaggaagtaaacgctgtcacggccaagctctctgcacaggtggtacacctaggaaggctggtgcttgaaatgctcctccctgaatgtaccagatagcccctggttacggaagattgtgcctccatgcacccttctcaaactggctaccccatcctaataggctacaagattcctggcagggactgcagattctacactggtttggagtcctgctactttagccggccaggtaaggagatgtttcactctcctgcccttatcatgaagaagcatgagaccaaggaaaatctgcatatatgaaaactgaggaatccagaaaagataccacaggattctttctgcatggggtaaaaaacctctctgtcatttacagaaagtctcccctaagagaagagataaaggtcattatcaggactggatttgaaaaactctgatgtcaggttatactcaaactacttaaagcagaatctctgggggcagtatctaggtaccagtgccagtgcactatcaagctgcagagtcactgctttagaagttgttacggagggagggagggaagggagggagggagagagagagaaagaaagagagagagtccaaaacttggaaagaagaaagaggactgcatgtcttctttagtgtcatactgtcacatcgttttccaggcccacccaaagattactgaactacctagaggaatatacctctgtttgaccttttcctttctattgattagaactcagatactgttcaaagttaacctgtacatttgtagccagtacacatgcaaatgatttctgtccagtaataaagaaagcccctaaggttgcagttatatcaccctataggatattatgcagctttgtatcttatctagaagtctatctctaatttggcaatgttcatctaacattcttcttttattgtctgtcaatacgtagttcctttatttttctttgaattagctttaccatattttggttcactcattgataaactgaatacattttgacatgaattcattttgacatgaattcattatattttgcataaaagttttttttaactttttgaaaattttactttgaaagtaggcaaccacttttatattctccatcaatgagcttaacttgctccaatgccagcactctgtaaaaaacttatccaaccagctccactgatgctggaaattcacatattggtaactcattgctgagttaactctgccatgtcgtcataccttagatgagtggtgaaccagatcatccagccagtcactcatctctgactctgtgggaatagaaccatgaaggagtacattttgaagaaatagcatgagttgagtaaagcactagcatgtatgtaggatggtgaggagaataatctaggaagggtgagagcaaatatgacagcctctgaggatggagggggagaagcagaatgcccaactcaaaatgaggtgatagacacaaagaaaattaactgccttcttcaaaattttgaactggggtaagcctgctcctgttacataaagatgaatgaatgagggagtaagagaggtttaatcagttacaggctggatcaaataggctctattggtctcatctttcaagcatgccttacctattggagcagcattacaggtagcttcaggagtgactgccacccagtgtgtgtgccaccacgttcagggtccaaagctggacctaatgatcattgaccatgtcttttccattgactatgaccttgacaaagtcatatgcaggctggttcaaaggaatcactgcatctatttgaaaattcactggcttccctgatcatcgtcctacttaatgaccatatgttataatttactgtggaaagtcaccctacttccttctttgctatagtcgggaaaccatatttcctgttacattagcttctaagagactcgagtgagcaagcaaattacagatctgaagacagggatgcatcccattcccatccctgacatgggtcacacaccaggctaaagtcagcatttttcagatagttcatcagcaatactaggagacctttccagcaaggttactatatcactaaagcaatcatgtgtgtgagtgcccccagccagattgagctaattcaatgtgaagtaatcagagataagaaaaagccactggagttataaaagtatacacatcaggtactttacccaagaggaaggggaagtttactgggaggtgaagggagtgcttcaaaatgataagaaaagtgaactagagaataaaatgaagattttattagaagttaagacagataatagaacaactttttttctactataaaaggaataagaggccaactaaggactcatcagggttttgccaagataggaagagtggtcgtttgccagaggagttggacattacagaaaaaatggaggaatgtgttttttcagtgctcaccagggaggaaaatgcactgtgtgccaatgcagaagtaccttccttaaagaagaaaatgcaatcatgaaaaccactggggcaaaaacatctccaggaggaagaagccttggaagtccatttggaaatactcaagccaggaatttccagtgctcctgaaaagaagagaagcaacttcgagcacatgaggcaaggagaacgacttccatctctttagagtcccaattcttagaggtcagggaataggcactgtccctgagaacaaaccttctcataataatggtagggcctcactggcagagctgaatgtcaatgctgggtgtaagttttctctcactgccaagtttcatcatttctctccctattacttgctccttatgggagtagagttgggttgaacatttggtcttagaccaaggggaactagtcagaaagctgggaataaaagcttttgccaaaagcccgtgttctcaacttccacacccagcttggcaccaagcagaaatttcctgtttagtccggccctattaggccccagtactctatttcagtgattggtgctgagaaaactcattagccattgggaaaatatcatattatatctctacctcacaccatatagaaaaatattacaagtagatttttaaccataaaaatattggaagaaaatatgatcaaacattggagacaattcttctacctatggactaagtctcagcaaaaatgatgcaaaaagtgatgctgtagatgctgtatatgcctggttcaggcacctaggttcttttttttctcttggaagcgtgatgtgccagtttccacagttactgccacaaaaccctctctggagatctgtcctttggcaacttatgcctcctgagctggaagtctctgtcagctcttctccctagcctcgtgaagctgaggctagacttaatccaaacccacatccttgcttcttcctctctttcatcctaattctctcactttactcacagttttcttaaaactgaatcctaattcccttatttcacatacagttttcaagaaaaactaataaatctcttggagggcagatcatctgagcccaggagtttgagaccagcctgggcaacatggcaaaacctcatgtctacaaaaaaaaatacagaaaattagccaagcatggtgatgcgcacctgtagtctcagctacttgggaggctgagatgggaaaatcacctgaacctggaaagtcaaggctgcagtgagccatgagtgtgccactgcactccagcctggataacagagtgagtccttgtctcaaaacaaaacaaaacaagcaaacaaacagacatctctgcttcagtgtctgtgtctaggaaactcaactcttgatacctgacttaactaaataaaaatgtaaataattattatgcagaaatataaatacatttaaaaagttatgtctctatgtatgcatacatatgtgtataaatctatttcgatgtcgtgggctgaattatgttccccaaaattcatatgttgaagtcctagtcccagtacctggttatgtgactatatttggagataaggcctttaaaaaggtaattaaattcaaataatgtcctttgtgtagaccctaatcctatttgagtggttgctatccttataagaaggggaaattagacacagagagagatattaaggcaccagttcacagagggaaaagcaatggtcacagtgagaaggggacaatttatatgccaacaagagagactccaggagaaaccaaacttgctgacgcactgatcttggacttctagcctccagaaccgtaagaagataaacttctgagtttaaaacactcagactggtcgcagtggctcacgcctataatcccagcactttgggaagccgaatgggtggatcacttgaggtcacaagttccagaccagcctgaacaacatggtgaaaccccgtctctactaaaaacacaaaaattagctaagcatggtggtaggcacctctaatgccagctactgtggaggtgggagaatcgcttgaacccaggaggcgaaggttgcagtaagccgagatggtgccactgcagtccagcctgggcagcagaatgagactccatcttaaaaaaataaaaaataaaatgcccattctatggaactttctttttttttttttttttttttttttttttttttttttgagacggagtctcgctctgtcgcccaggctggagtgcagtggcgggatctcggctcactgcaagctccgcctcccgggttcacgccattctcctgcctcagcctcccaagtagctgggactacaggcgcccgccactacgcccggctaatttttttgtatttttagtagagacggggtttcaccgttttagccgggatggtctcgatctcttgacctcgtgatccgcccgcctcggcctcccaaagtgctgggattacaggcgtgagccaccgcgcccggcctatggaactttcttatggcagcctgagcaaactaatacaattcatatagagatatatagtatcattatctctctctctgcctctttcacacacacacacacacacacacatacaacatacacacacacacacagacacatgtgacatttcaaaacatcaaaatatacaaagagcacccataaatctcaaaaaataaaatagaaaaaatgaacaagtgactcaactagacgattcaaagaagaataaatcaaatgccaataaatacctgagaagatgttcagtttcatcgtgttctccttttaggtggcacctgctctaccggccaagccctatctccctatcactcctttgcatgttattgtccagtccagctctcctgcattagcaagcccacagcaagtgcctggacagttctgtgcacatggtaggcactaaataactattgatgacaatgtaatagtgctccgaggtacacagaaaaccatttttaaggtaattcaagaagctatcataatggttttgaaaaatcataaaagaggaagaacaactagctccagtaagagagaaaactgttcatcacaagtaatgaaagaaatgcaaatcaaaaggcaatggggttactttttgcaagtttgcataatatatataaccaaaagctagaaagctttgctacttcgggtgcaataaaacatatttttggtttgctgatggcattgtcagttggcaaatacaatttggcaatgcactcctggccatgaactttaaggaaaaagtcaaaatatgaaaaacaccatgtgaaagacaatgtctacaatcatgctgcttatgataacaaaaaattagaaatacccccaaatgtccaataataaaggaatcatcacagaaatttcaggacattcactcaagggagtaataagcagacaccaaaaatggcaactacaaagaccaaataccaatataaaaattaacataaacgcacaacttaggatataaatttacatatggacgatcattatagctatgcaaacacatgcaagtaaagaaagacaaggatgaatacaggaaaacttgtgttgttaggactttttttctttttctctctatttcaaactttctcaatctttgcactgtgcatttcttgaaaagctaaagtcttattcaggaaaacaagacattcatatgtacctggataaatgaagtaaaaacaatgctggccatttttaaaaagtaaattgtaatgtcagaatcccaaaataaagacttagatattaataatagccactgacacttcctgaaatcttactaagtgctaataatgtgctcgatgcattttatgaactgtctcacttagtcttccaataagccaatgagggagatatgattatctttcctgacttaacttttgagaagatgagtcctagagaagagaagtaacccatccaagagcacataagctctgcagttagtaaacagctgtcacaaggtggctagctgcccccaaaagcatgcatgcttcctgttctacactgcagaattgttgctgagaaagagctgctgagccagggacatttcccagggctgctcactccctcccccaacccatcctttcttttgcatccagatggagccaccttcctagaaggcagacagcacatcttgtagcctgtccttagcagggcacatgctgctctagggaggagaatcaggtctataaatcagtcagaagtctgaaactaatatcagcaacagaaataattaccctttttaaaaaaagattgtattaaaccatggcaatactattcttcaccaattcaactgccagcattgaaaatatgttacttccgagaatagaagagagtgccaggaaatgggtaatttcctaacttgctggtggagagtaagttgatgattctaactttctttgggacaatttattaatatgaatcaagacttcaagaactttagaattctgtaagacttttgacccaggagttattttggaaatgatcttaatgaaataataagtaatgtgagtaaagatatatagcaattgtattgcttcatctcagaaatttgtatattagagactaggagaaaccatttaaacatctagttacagggaagtagaaaaattatactttggctacacaatgagttactatgcagctattttaaattatgttgcaagagaatatttaataccagggaatgattatgatacattatacagtgtgattccattcttattgcatttgtaaaagcacagctatatcaggcatgaatttgctctttctgtgcaggtgcaagaactatcacatttctttttctaattcgaatgaaatctggcttagaacccccatcctacatggctgaaagagccttattaaaaacagctgggcctccctctccccacaccacaccctgtacacatacacatcttcctgtagatcttctgactatcccaatgcttcttgtggtaccaagaaataaaaatgtgcaggttttcaggccatggttgttgcctctgctgccataatgcctcaaaatatacctggtattgacaagggctgcagttctggaaggaaggtggaaagagaaatgcctttcatagtactggccttgtcacaggcttgactacaggaggcttctgccattgtactcaaagtagtggggttggtgttctgtcctgggagaagcaccatcagaggttttgccactgttggtgtgtggggagggggtgcaggtcttagaagacctgtgatcattttctcttctcaacctcccctggatacttcacctcttttctaggaccactttattttattttattttatttttgagacagagtcttgttctgttgcccaggctggagtgcggtggcacaatcatggctcactgcaacctctgcctcccgggttcaagcaattctccctcctcagcctccagagtggctgggattacaggcatgtgctaccatgcccggctaatttttgtatttttagtagagacagggtttctccatgttggccaggctggtctcaaactcctgacctcaggtgattgcacctcgccttcccaaagtgctgggattacaggcatgagccaccgtgcccggcccactttaccttccatatttaaactccagtttatctctctcctcttcttgtaggacaattctgccttaattctatgactaacctaatcttccaaactaatgttttgcctgattatttctttgatgaccccaagacccaaataaactgttagtctccatcctttaaatccaatccatatacctttgcccacttatactcagaggcacacacaaacccacacacagatgagcttaaaccttagaattcaaaggcatgagtggcttttgaatttttttttcccagaggtatgtgcatgtgttgagagaagaggatagaaaagaaaagggtgaaatgagagaagtagggaaattaattatcattttattctctctcacttaagcagtgaaaacaagtcaacaaacctgccacatatgtgtgcattataaagccttgaagaaagtgtttttctttgtgtgatggggttataggaaaattcttattttcctctttgtattaattattattttccaaattttctacaaaaactatttattctacaatttaaaagaatgcaatttctttccatgttaagatatcaactattttttttctaattcttttaccaccttttgtatttctaaaacaaagaacaactgaaaagcaatgagaagtactttattgaaggacacagaccatgactgtaaaggcattttgaaaaacaaatgagaaagaaagtccaaaaatgtttcttaagtggtagctccactggaatcagtgtgcagctttctaaggtaatgaagtaaatagtaacattgattttggatgtaaatatttgaattgattactttgcttgtcttggttttaatctttttctctccccctaaagaacttccacacatgatgccactatgggggtgtgtacccacactgactaaaagtacttatacttaaagaatgttttgctattcccaatccaatatacaatcccattagaaggtaggttaatagatagccccagttcaaaaaagaactgctattaccctccatttttcctctctctgaatcagagattctcttgacaactatcaacagcccaaccataagatacgaatggagatggtaatcatgccacaaaaaaagcccagcagccccatgggggtgcctggaatggtgagattcccatgttcccttccagggcatttttcaatctagaaacattctatttcagcaatctctcctttcagacccttttccatctgagcacctatccagacattaaaattcgtatcttcctttaagaaatctccgtcacaaagccatcatcacccttggctccagcatagataagtcttacatgtgtgatcagaagtaccctggagggagataggaggtgggggagaaactaaaagggcataaacagaaagtgttcctcaacattttcccccattttcacctgattcagaaacaccttgagttcattaccaaatccagaaattatttaacacagatgtacttaaggagttcttgcctttttgtctgtttctcaagttgcccttcatcaccctgaagtcatgaccaggttttttagcagaaaaagtcaacacctgcagcaggcttggccaaggactgagctcatctcctagtcactggctccaggttcaggtgctgcttcctcccacgcttctgcatgtccttggtttacaaagcagatcctactcacagggagctcagggaagaacagttccttcatattcagctcttccaaagacagtctttggataggcggctgtagccaatatagcacagtattcaaaccatcctctcccaaattcacattgttctgcatcccaccactaatagattgtggtgttcccaagggctatgtttttaattaactcaatatttattgatttctattgtatggcaatcattatacttttttgtctttgtaataccaggtcttggtcataagaagcatataataagtgtttgtttttcaataaatgaatatttcctcacctagaaagtgagctctaagaggtcaggaacttgtgcctgacacctcctgggtgcttaaaaattcttcgttaaaattaattaattagttaactcgtgagtaaataaaataatcaacccataccaaaaaactttgtagctgacagtagcaataagtaatacatctgtacaatgaaaatattttgacttttggaattagacccagatccaaattctaggtttatctatatgtccccatatatagaaggaaatcgtatttatctgattgaatcatgaggatttaatgagttattaaacataaaatgcttggcatatttaatggatataaagtgcctggcttttctaatgagtcaaagatgctagtttctcacctttatctcctgtttctgaatctcagttcgtcatccttaaaatgacaataataatggctacttcatcatgatgttgtgaagattaaattgctgtggaaagttcctgaaacagtgctcagcaaaaatcatctctatttttcttacatttcccctaatttcattatgtagctaatgtgtgaagctggaagaaagaagtggattagccattcttaagagtcttgggacatgtgtttcttaatcttcaagactccctggtcttcaacccttcaacagctccctggaagaagaggttgtaaccaagactggttgtgtcctgaaattgatgcctctctttttctccagtctagaaatccctgagatttaatacaaggattctcagaataaaactacattccccagcccctcttgctgttagctgtggtcatgtgactgagttccagctgacggattatgaacagtagtgatgaatgcacatctaagtcctgcctttataggggaggaatgtgtgtctttctctttcccacttcctgtatctgaaacgcagacacagtggctaatcatcttagacaatgtggacaagggcactgacctctggaaagcagacaacaagataatagtagcttagtccttcctgctgctataaccagggtctcaggaatttgacaggaattggtgcaggaatgtctcagtctattactaagtattagtaatactcaatattattgccactattaccccagactatgtcattcataaacaataaaaatgtatttctcatggttctggaggcagggaagtccaataccaaggtgcaaacaggtccagtatctggtgaaggccctctatttgcttcatgggtgacatcttcatcctgtgtcctcatgtggtgaaagagttaagggaagctcattccagtctcttttataaaagcactaatcctattcatgaggatggagccctcaagacttaatcatttccaaaagtcctgaccacttaatactatcacctggtgtattgggttctaacatataaattttgggggtataccaacattcagatcatagaagtaacctaactccccgaaccatggagaaatcatgtgagcccctgaatgcttatgttcagctatctgagagagaaagaaatgtttctcttgcttaaactacagatacttgagtctttgctgtttcagatgaaactaaatctgatctaatacagaggcattaggagatcttcgaatatccaggcattgttaatgacaaatccttaccttaggcactttttaagcctcccccatagggatcccagccaccaggcaaggctaatctgcttggtcggcactgcctgctcaccctcttactggcccgcctacccagagatttaaagttcccacctaggcaaccaaccagaatccaatctagccttgaaagccccttccagagccaatcttgtcaatgaagctttccctgctgaatgatagctctctgggatctctcccttgtctgagctccatagcagctgactagaccatctgttgtttggttccaaccccattctgttttctagcccatgggttttcatccctatgcccttcctctttatattaacaaattcattaagaataagatccatgttttaggcgtttttatcagatgtttgtatctttatctgattttggaagtcatttctaaccatgaagcatcatactctgtactctagaagtaaagtggactttagagattggtttctacatcttcctaaattgtgatgtcttcaaaggcaaaaaaaaactgtgtcacaatgagctctgtgtccacagtaactgattcatgcatgtacctcagtcaatgcttacagattgatagatagatgaatcttagcaggcccccgtcatctagaataatgtcttgtccttaatgcctacatgcctctataaactaattacttaatgtgggtgttgccaaggaaagaaactgtgaaaggaaaataaattttgggtaccccaaatcactaagctaaagggaaaagtcaagctgggaattgctctagactaacctgcctcccattctattcagtcacccctctgctcactgagacaaatgcatatctgattttctcctttggagaggcaaatcagaaactcaaaggaacacaaccattggtctcttacctacctatgacatcccgcctttgcttcaagttgtcccgcctttcccagaatgaaccaatgttcatcttacatatgttgattgatgtctcatgtctccctaaaatgtataaaaccaagctgtgctctgactgccttgggcacatgtcatcagtacctcttgaggctgtgtcatgggcgtgcatcctcagtcctggcaaaataaactttctaaattaactgagacctgtctcagatatttagggttcatgaagctttttgatctttggatttggaacttacatttcctaaaacactttcgtttgtaggcaatagaggcttgacaaactgatttaggcaaaaagtaattttagtttcatagaacaggaaagtcaaatgagtaccttcaggtaatactggatacggacattcaaaaaaagtcagcagggttctgtttctttctctctccatatcttagacatgtctctccatacttcttttctgtgatagcttccagtagcccaagacttaacatagcaaactcagcagcccaacaaaaaacatgttccctaatatttgtataaaacatgtatcaaggagtattttgattgctttacccagcctggacatgtgtctatcttgaatcactatggccaagaatttggggtactttactagacacatctaggtcacatgttcacctgtgagactagaggagagggccagctgggttagccccatacaggctccagaatagagaaaggttatgttccagaagaagagggacaaaccaacatatgtccatcactgtcctgtagctgatacctccttctagactcagtcagctcaaaggttttgcctgggatccacatgattctagatttcttcttggcctggcgcagttgctcacgcctgtaatcctagcactttggaaggccgaggcagacagattgcctgagggcaggagttcgagaccgccctgggcaacatggtgaaaccccctctctactaaaatacaaaaatttagctgggtgtggtgacaggcacctgtaatcccagctgctcaggaggctgaggcaggagaattgtttgaacccaggaggtggaggttgcagtgagccaagatcacgccactgcacttcagccaggtcaacagagactccatttcaaaataaataaattaattaattaattaagtagatttcttcctaccatcttcttgccactgttctcgtcctgcagtcacttcagtacgttccttcagtgtctccccttggctccaccccttcctgcactgccaaagtgtaattgatagtttagtaggcagaaagagagtgggcatcccaggattggggaagctgatttaccttctgactaattcaaacctagggtctgaggtaactggagcaagtccctggtgatgccacacaagagaattctgcttctaggcattcctttctgacaggaaagaaattcatgctgagcttattaattggctccatcagcctgtcaaaaaagcacttggtagttactctaatcaagtcatttgttttttctagttgagatcagttattctccaaaatcttcagaaggcactggattcctctagccgctgaaaagatgggttccttgaacaatacaagtgtctaaaagtctctgtttgccaaatttgccagcacttggtgaatgcagtttttctcccaataagagaaaagcttctcaagattgtacactgagagtttcaagaataaattctagatataatagagctctagagccacctacccctttccagacccttgcctcctcctaccaagccacaccagagcttctctgaaatctcaacccaagccagaatttgtgtggaagacttcctaaagtactttggcctgcctgagcattcgtgaggtcagtgtcttcttctgcttttctctctagcacttcctaggatatatttaacactcccatgatctcatttattaataatgtggacttacaactttacagtttgcaaataacctttttcaagcattattgtggataactttcccaaaagcaaggagagataaatagaactattgtgctctaagaggagagaaaactgagattcaaagagtattatgtaatagcttaaggttacatggctagtaagtggcagagccaggtctcaaacttatgtcctctcattacaaattccttaactttttgttccgtaacacagtctctaattatatcctgttggatgagtttgactcccaataagtctgctaccttgaggatacaaggcagatttttgttttgtttgcctctgagttctacctgtagaaagctagcatagctctgtgtgtgtgattggtattccaaaataatttgttgactgagggaataaaccattggccgctgtgttcctggtgaactgagttgtcttgggaattcagctttgtaggcagggtcttactgtcaactctaagaaagggaggccataccttcattagcatctggaggatgtgcaaagtgaagccttcctgtggtagtggtgagaattgatcattcacacaaccattcattcaaccaatactattttctgtcttctatgtaccaggcagagtgataggtgctgactataaattgatagataatatacagacacacccaacccagaagagcttacacctctttgagggtcttggactctaataggagtcatctaatgatgatgtcttcattgttctcacctgtattcattttctactgatgagtaacacatgaccacgaattttgcaacctaaaacaataccaacttgttaactcagactgtgaagactcacctgggttatctgccaaagttctcacaaaaccaaaatcaaaggtcagccaggtggagttcttatctgaagcttctgaggaagaatctcccttgcagctcattctggtagcagagtccagttccttgtggtcgtaagattaaggtccctgttttcttgctggctgccagttggggttttctctcagttcccgcaggctacccttaggtcttttccatggggccacctccacctttaagtctcatacttcccctttttctaccagctggagaaagctctgctcttaaaggattcatgtcattaggccaggaccacacagatagtctccccttcttatagtcaatctcccaatataacatcacctgctcaccaaggagcactcacaggggagaagattttacaaggcatggatcactggggtcaccttaaaatctaccagcacaccacctctgcccaatttcagtcacttaatcacttcacatgggcatttgccacaatctaacaagtgtgtttttccctgtcctgtctcatccatatttaatcagaggtcacaacactatacctttgcatatgcccgtctctcttcctggaatgctttccttgatgcttatcctccaacaaaatcccctttaaacttaatcctccttaagactcaaaggttacaccctctgagggtcttctcagcacccagccacccatcagagttaaataatcccttccctctgttttttatgagacaatccatctcatcacaccagaatctaatccagactattatcgtcttaaacaccagactgtgaggtctctgacatcagagtttgtgtttcattcatctttggtttcccagggcctcccacggatattggcacatagtaagtgctcggaaagtgtttgtcaaatttgaattgacctgaactttctatcctctgttctgcggattcatgattggaagagcagcacagatttgaagtctagtttggggcataaagtaaaatatctgcaatttttacctcccagcatggattatttggtgttctgattattgaaccctaataagccattatgaaaccacaacacccccactttccatccatgcaatcaacatgggatttccttactaccccatccaagtatagactcacctatgactcaggctttgctaataagaggcaccgtgattgattccaagatggacacctgatgcaattcagctgatgacatgcctttcatcctcttacaccctttgggaaagcagttttctctttccgtcggacttgtggagctggtaaaataaagacttgaagcaactagtggctttctctgccaccctctaaaggaaacctcataatgaaccaacacagaaaaaataatagaactaagagatgacaacagagaaacactgagtcctgaagacatcatgagccactggactgagccacgcctaaagcttgtcatcttttgaattggccagtaaatgaaatctcttcttacttacatttccactgacacactttcccgtttattaattagcgttgggtttctgttacttgcaaccaaaaccaaaaccctgaaaaacacaagacagtaatctctaattatggggaaaaaatccaaaaataactaaccccttcttacctcattagtcttcatgaaaactgaacaaatggggtcattggaaatgccactgcttccaagctcttcaatactaacctgctcaatcctttttactttgtgttggaatgcaaagaccaaggatttggggactgatactgtaatgagtaacagaacagagagtattgttcattactttcagaagcagcaacttaagtcttgaagccaagtttttctaagggaccccaggtgtgcaatttgcaagcaaatgacaatctacatgactattgattgctttgaccagctaattatgagtctgtaatttcctgggccctaggatttctctcctatttcctatattggaactccccttggatctcatttgtttgccccaaatgatccctagagaggaacttctcctctcatcagccttccccacgtccttctccatcctgctggcctctcaataactgtgtcaccagatttcaaagggactttcagcttattgcataatcagttcttcctctgagacatcccccacccccatcattacctcagggtgttggaactttgctgtaagctgctcacagatcattaaagatcccagctgttcctggtccataacaacccctttcaactgggtctccttccaggaacagctgcaaaagctccagaaaggaagggaggagacacatttagcatgataacaaatcagtagggagtggccagtttacccagaaaggctgtgatgcagttatatccacccagcaactctccccaccctctaggagagagacaaattcgtgctgcctctgtgtgaaaactcttcatatctaaaggaatgaaatcaagaatcacaacccacccctgctccctggagaggaacctggacaaggttcttgctttttccatcatcattcacaaaaaggcctgtcagtggttacaagaagattattatcttgcatatacatacatataacatatactcacaccaaattaacaacatggaagaaggagctgtcatctatctcatgcagggcactgtgcaaagagttcaacatatgtttgcaggctgggcgtggtggctcatacctgtaatcccagcactttgtgaggccgaggctggtggatcacctgaggtcaagggttcaagaccagcctggccaacatggcgaaaccatctctacaaaaaaatacaaaaatagtagctgggtgtggtggcacatgcctgtagtcccagctactcggaagactgaggcaggaggatcgcttgaactcctgggaggcggaggttgcagtgagtcaagatcgcatcactgcactccagcctggacaacagagcgagactctgtctcaaaaacaaacaaacaaaaaaaccagatatgtttgcttgtgaatccttctttaaaaacaaatcacttattgataaggaaatcaaggcacaaggagattgaataacttgcccaagtttgcacaactcagaagtagtggagctgggatttgaactcaagtcgatctgactcaagcctatgctgtcaactctaatcccattccaatataagacccattcaattacctaattggtacagagtctgggatttagtgggcaccattaaagtttcatttaatgaatttattttaatgaaggcaaattcgtgccaccattcttccgaaatgcactttaccccaatcactttatctacctggaaaacattgaatgattgtgcaagatatatcttaattttcatgtacagtatacaaagactttacaagaagcccctttcccttgttcagtggacagtcttagtcattccctccacattgtctctattattgcctatgtggcacaattctgtatgtatcaaagactttagttgtctgcctaccccatgagagctaagcaacattgccttgaactttctcctttcatggcttcaggaaatgctccctcaatatttctgctaattcccaagggttttacatctcctcctctgttctatctctcaagctccagcttcctctattattgcttttgtctatcactacaccacttgggaataaaatttaacacctttaatttctattatacatcaatgtcagtttttcatgcgcctcgtaatttggaagggagggcagcaaaaggagtcaagtagtctagcactccactttctaccatcttgtttgctcctacccttacccctctctgcactcctcttataagcaatataattcctcaatttcttcacacaatgtatacagagcaatttccccccaaattctggtaccaactaacatccaggccttggaaggaaggaacagcaagagatgagagtagagtataggaaaaggggtggggactcaaatcataccaaaatccctcatgtatttaataattatttcttgagtatcccctatctgtgagctaattaggacacagagatgaagaaaaacaagatgtctattgttatgaaggttacatcctagtagaaggaacacaaagcaaatgaataaacacagtcctttccaactgtgatgatgtgaaagtaacctgtgaggtggatggtgactaattaaggtagagtggccaggcatggcctgaccttagaggtgatatttgaactgagagttggagaggtgaaaaatcagccatgccatgaacttgagacaagggttataaactgaaagaactataagggcaaaaactctgaggcagcaacaagcttttgtgtgttctggaaaaaaaaaagtgagaaagtagccgtaaaatatgaagacagagacagatagtggcagaacacataaaaggtttttttcttcactccagcggaaatctatgggatatttttgacatatgagtgacccgatctaatcaccaaaacattttttttcaaacaaaataaacacttcttcctatttatgcatgtattttccttaccagactatgagttccttgaaacagacaggcattggacaagttacctcatataaaatgatgaaatgacatagacatagctttatgttttgcattcttctcatttcatgttttacaaatgaaaaatgcttgaacaaatgaataaattattattaaaaatacatgcttaacatgcatttcaatatttaaatgtatatataaagcaaagttgacagaaataaaaggagaagtaaacaaatctgcagtcatcatctaagggttaaagaaaagtcatgagaaaaattaaaaattatttaaactgaatggcaatgagaatactatatgtcaaaacttgcgatataaagcaaaaacaatgcatatattagaaaaaaagatttaaaattaatgttctaaactttcatttttaagacactaagaagtaaaattaaatctaaagtaagtagaaaaaaggaaataataataaaagtaggtatcagtgagctagaaaacagaaaagcaattaaaaaatcaacaaaggcaaaaaaacacatgttttaaaaatattaacaacttgttaaaccccaaacaacactgatgaagaaaaaaaagatagaagacataatatcaagggaaaaaaagcagagccatttttgcaatttctatagaaattgtaaggataatgcaataaatatatcctacaaaatgctcttagccagaacatgtaaatatgtaaagaattactacaaattaataaaaagaaaaacaaataatccaatttttttcaaaagtaaaaacattaaaaggtaattcacataagagaatacacaaatgtaaattaacaaataaatgtattagtcgtcaagaaaatgcaaagtaatggcaaaaactgcaattacttttgcaccaacctaatactaccacacctacataaggataactaaaattttaaaaactaacaaaattaagtttgggtgaagataaagaacaaccagaatctgcggacactgctagaggaaccacaaattaatacccttttaacactgtttattagtatctattaaagcaaacatatatgtctctataactcgtcagttccaatcctgtgtatacacccctccaaaaggtgtgcttatttcacagcagctctgtcatcatatcccctaactagaaataccaagagcaggatggatgaatctcacggagagtattagacaaaagaaactagacacaatcagcttcatgctgtatgaatccatgtctatgaaattcaaaatcacaaaactaaaccatagtgctagagatgtccttccaggtggtgtgtgttggtagtaagagtcatgaacaagccttctggggcactggaaatgttctatgtcttgatctgcatgataatcccataagtgtgcatagatgtaagagtttattgaatcctatgcctaagatctgtttacttcactgtttgtgaattaggcctcagttaaaaggtacaaaacaaaagttatgtattatttaaacattccttaaacaaacaaaaacaagttattcattaaagcaatagtcacgctgcatgcagtggctcatgcctttaatcccaacactttgggaggccaaggagggcagatcgcttgagcccaggagttcaagaccagcctgagcaacatggtgaaatcccatctctacaaaacacgcaaaaattagccaggtgtggtagcatgcatctgtagtcccagctacttgggagaccaaggcagaagaactgcttgagccatggaggtcgaggctgcactgagccatgatcatgccactgctctccagcctgggccacagagtgagaccctgtctcaaaaaaaaaaaaaaagtcatgtaataataatatagctgatttctccccactggcaacatgctcccccagcataaaactatgaccaactcataattagacttttacttcttggagcctactagatgttcaatatataattgttgagtttacagaattatagtaatggaagggcataagtttatctgtttccccttttagagagctctctctaactcatctgatggtgcagtccagatggtatatctctaggaattcattgtttccactatgttgggccaataaattatgccagctaccacatggagatgttcaagcttctgaaagtaccaacctcacatgagcttagaagctggcagacacctgggaatgctgagatgtaacagaatgtccaataatgtgaagtgacgtcagtgaatgcttgggaaggtgcaaaacataaatagaattcaaaacagtaagacaatagtgtagcaaaagtgaggtgactttaagaacttcaaaatgaggttagtctctgaagataaaactgctaaaatctatccctgaaatatgagccatttatcaatgttgaccaatcagttgttagagtttggggaaatgctcaaattttaatcaaaatacttagggaatagcctcgaggaagcacagatgatactagtctacctaaaactgcatacacacagcatcagcttggcacattaacatgagctaacttatcagagaaaaacaaattgatttttggtaatttggccagagctgacacttcatcaactgcattgactctcgttggaaggaaaggatgtgcaagcatggcggggatgatgggcatgcccggggatgacgggcaggccatcctaaagggaaacagtgtatcagcatttaccagccctgtcttgactttggatcaggaagcagaagtattctggttaatagaaaaagttgactgttgagggataagtggagttttctgtatcattcttgcctagctacaatcactttgggttagaactacctccctttgctctgatccctttactcagaaatgtcctgggaaatgtagagaggccttgtttaatttcccatgggaagccacatatgaggaacgaatatgaccctgagcaccaaggtctggctgctcatcatggttattaagtaacatttgttagttattctgagcagtcacttactgagctatattactcaggataggccgaaagtgctgtttcaaaaaccctgaatctcagtggtttaacccaataaaagtttagtgttttccctcacttacggtcatgcatgagtcttgggtgggaatggatgaggaagccctaatccacacattcaacgaggaacctaggcctctcttatccttgacaccatcgtcccccaggtcctcagagatctcttatttcaattgatagattaataaagagagaaagaattgcacatagaaggtttgctgggccagtttgaatggacataaaatgcgtattcacattccaatggtgggaagtgattcacatggtcgcatctgactgcaagagaaattgagaaatactttctgagtactcagaaaagagagcatagaaattgtcatgccctaataatctctgcctgttgtactaaatgttttatattaattatattatgtaatccttatcacattccttaaacggtggtagaatcagagtactgtaatcttacaggagaggaaacagaagtatagctgggataagtaactcgctgaagaacagggaactaattgtatttgagccaaagcaaggttagaacacatctctggagttcctgcttttaaccactaagataaactatatttattgtggcaaattaatattaaaatattagccttcagatttataagtttcagggcatttacaagacagtgagtttgaactggaagactagattctagaatacggtgaccctccaaggcacttcctcctctgaggccatgatgaatgtccagccaagcctgcagtacatcctgtctggacaaactaaaacaaataaggatatgagttaagagtaaatgaggacttatcaccaagccaagctgaattcttcaaatcttacatgagttgaactttttaaatccctaccacaactcaatgaaataggtactattatgaagatattgcaacacagagagattaagaaacttgcccaggaccacacactcagaaaggcccggagccagagttagatccaaggcaacttcagttctagaatacgttctctgggccactatgttaaagaaaagttcaacaaggatgacattaactctgttggtatactgttttcatccacggtgattcccataatcacccacatagaatgaaaacttgatgtaactcatgtatcatctcctcttccaaggaggacagggcacttcttcacacaaaaaggtacacgggaagtatttatgaaactaaaattatttaagttgtattaaattgaaggttgtaacatggtgccctttttcctctcatctatatccatctatatccataaaattaaagatagctaagtattttatataaattatctcatttaatcctcataaaactcaccaaggatataattttacttccatttaacaggtcataacaccaggttttatcataaagaaacaaagtctgataatatctgacttatatgtgagaacaaacttcctaacacttttataatgatttctgaacatctctctaaatgatgagaaatatcctactctggcattccaagaatataggcggttgaaaattcaggactttgctttcacaattctatcttttttacttccagggaagtcatttccgtgaagcactggtgtgaacaacagtcacaagtgggaagagcaatggaacaaggaggaggaggaatgaaatggtcctataattttagaaagagtgtgaaaaaaagaagttagacttctaggttctatttctggctctgcttctgttttcaagccagccagccatctttctacctttttctccattaattgccaaaggtggagaagaatatagactgagtatgaagcaccttgtcatgcttggatgaaagatcctgtattatgacgagcgcaaaaccagaattgatcatgttgtgaaatccacactgtgttgtaatatattggtttcaagcttttcaggaatacttttgctctgaattcataaggttagagaaggcaaaattgcattttaagatgggaatgccaaagatggatgtagcccattgaaaacaggcaatggctttgagcaaagctagccccacaataacttgtaatggtagtgaagtttgtgatccatcatatgatcttttcttcctgccttttttcttcctcattaaataacccatttccctaagtaccagtttgtatatattatctttattattatttgtatatgtgtaaggagcacaaatgcaattttattacatggatatattgtgtagtggtgaagtcttagtttttagtatatccatcacccaaataatgtacattgtaacccattaagtaattttttatcatccaccctctactcaccccccaacccttctgagtctccaatgtctatcattccacactctatgtccatttgtacacattatatagctcccacttataagtaagactatgtggtacttgtctttctgtttctcaattgttttacttaagataatggcctccagttccctccatgtttctgcaaaagacatgatttcattttctatgtccaaatagtattctattgtgtatatataccacatccaatcatccactgatggacacttagattgattccatatctttgctattgtgaatagtgctgtagtaaacgtatgacaactgtaggtatctttttgacataatgatttctcttcatttggatatacacctagtagtgagattgcaggatagaatggtaattctatttttggttatttgagaaatctccatactgtttccatagaggttgtgctaatttacattgccaacaacagtgtgtaagtgttcccttttctcctcatcctccccaacgtctgttattctttgtcttttcaataataaccattctgactgctgtaagatgatatcccattgtggttttaatttgcatttatctgatgattagtgatgttgagcattttttcatatgcttgttggccatttgtatgtcttcttttaaaaagtgtctattcatattctttcccactttttaatgggattatttgggaattttttgttgagttgcttgagttctttgtaaattctggacatggacccctatcagatgcatagtttggaaatatctttgcccattctctaggttatccattcactctgaggattatttcttttgctgtccagaagctttttagttcaattaagtcccatttgtctatatttgattttgtggcatttgcttttgaggtctttgtcactgaattctttgcctagactaatgtccagaagaattttctctaggttttctcctagtatttttatagtttcaggtcttacgattaagtttttaatctatcttgagttgattcttgtatatggtgagtgacaggttatccctctcaagaatactgcgtattcgaggaaaaagaattccaagaaagaaactgtgtggacagcattgtggcccattaactatccttccagtttgatattcacataaatatcctcctgttgagggaggatggtaaaggagaagtagcgctgaagaattctgaggtccttttcaatattgtgaagtattctttatcaatgaaggacagttgttgttgcatttaactgattagggctttcccaatacccatcctaaattactagcaatagccattctaaattactagcaatagccatcctaaattgcataggttgtggtagttttcatcctgagcactgaaatttcatgagacatactgcaagtttttatggagaagagtgtgatcgtggtgacatgcttagtgtgggcgtgggtccatatggtcttgatccagcgatgtagttttgactataggccatttatttgtcacagagttctaagaatatcaggtatctcttgaactcctccttcctccaacttaaacaactggtccagggccatgtcaatactgatgtcaatgtcaagcgtaaattacttgtgatctgtaaacaaatctttacaatgccaaagcagtgtccttcagaagtaggaaggtatctctttttcaaaatctctgtcatatattgtcccatatttttcccaaacaggactttctcctcaggtctcactggtagaaatgggttcttcaacctctaccagacccctttccatcagacatcagtatgaatttgttggtttgtgttcagatactctgatgttctcctcatgttcttcaaccctcttccctctcacaaaaggaggcacatcattctcttcttagaagaagtcctcttaatctgatgtaaagcacctcagataaatagaaggctaaaggctattgtctctaccacttcatagataagcccaggcatcctgaatctcttttacactcacctgagacctccctccttcatcctattcacaaaagtacagatgacaggctcatacggctcagcatcacaatgtcttcccaatcctgtttcattaatttctaaagaattacactaaaataacaatcttcaaaaagtgcctatgtctaagaacctcttttaaagtaacttaatgtttctttctctcatgcaacaggtctctacttttaaaacttatgtatgtggccgggtgcagtggctcatgcctgtaatcccagcactttgggaggccgaggcaggtgaatcgcgaggtcaggagttcgagaccagcctggccaatatgatgaaaccccgtctttactaaaaatacaaaaattagccaggcgtggtggcagcgcctgtaatcccagctacttgggaagctgaggcaggagaatcgcttgaaaccagaaggtggaggttgcagtgatgagctgagatcacgctactgcactccagcctgggcaacgagagcaaaactccatctcagaaaagcaaaaaacaaaacaaaacaaaacaaagtatgtatgtgactctcttaacaactaaacctcctctattaggaatcttactactgtgttacttcatctcaaatcttttaatagtctcctggtgactttgagaagtatcatgaagaaaacctctccattttcactccactttgaaactggtcatgtcttgggaactgactcattctactaaccatatagcaaagagaaaaaacatagttcttagtttaaaacatgagcagttgtgtcacacatctttgtgttttggtaaattcatcattagagagagaaaaaaacatcagtggagtttaaaccctttgtcttgttaagtcacaaaaaattcgtgggctaaataaaccatgcagtgtcaagttcatgctgtttctataatctcattatttctggttcctcaataaaagcagggtaccagttattctaatttcaaagtgcctccctacactctcacacagaaaaccttggttaagaaataaaaagcatgctgtcattcaggcacacatgaggaggttagtcattttggttcattatttctaaataacacaacaagcccctgaaatttttgtagtcttcaaatggtcctgcaaatcgatgtcgaccttgcatgttagaatcatgattgcctgttgtgtctctttgattatttaggggaaaaaaaaggtattgaaatatatactaatggattatttagggaattagagtgtaatgaacatgggttaactttagtgcttcagagcagtatgagagctacacggttaccagcaaaggatgggagcctcctgaaagctggaatgctgcaaatatatctcatcaccttcaaatcctgaccactctttttttcacatgtattaatttaacaaatattattgagtatttaaagtgtgccatattctgcctacatctaatggcaacaacaataaaaaatcgtgatccttcctccaaagctcaaaagctactagagacactgatctataaagggatcataatactcaaataatataaaggatataaagaatgaggatagaaagtgcaatgggaagtcaccatattaatagattaaagaaaaaattcttagcatcctcttcataggtggtaagaagtcatgtgatggcattcaatctcctggccacaaaagagaaaccttatttctcctcacgaaatacaagaaaacaagcagaggagcttgttttcttccagtaaggtgggcatataacaatgcatgcttatccccttgttcaatcagctactggtttactctcttcccaggacagagggagtagcaaagctaattggttaattgtcattcactgagccttgtcaaggtaacctcttgcttctttagacatttgggctccaaggcagaaatggttcttctttcttctctgcttcttgtttcagcatgggaaacttttccgaagaagaccttccctaatcccatgggttaaaattgtctgctcaatgacatatagttctatgagctatatcacagagggtgtttcaggtcttttgaatttgatcttaaaagcaataggaaatcattgaagaatattaagcagggaagagacatgatcagttctgtgttttcaaaagttcaccatagctgccacatactgaatggtttgctaagagagcagttcagaggcctctgctgggccttttacaggagcgatggatggagaaacaaggatagattcaggatacagtttggagttagaacacacagctctaagtaattgaagagttgcagaggacaagggaaaggaaactgacaaggataatttccgagtttctgtcttgagcaactgcatgtatggaggtgtcctttttttgagatgggaaattctgcagaaagagcgcattcaggaacctggaggaggatcaggaactcccttctagacaagttgagatttaggagatatatacagaagctgctagcagtccagttggatattcgagtctatagcacgcacacacacacacacacacacacaaacacactctctctctctctctgtctctcacgagatgactgagatgaaaatataaatttcaaatttgtcaacatacatagatgatatttaaagccctgagtgtgaggtgatcccctagggagaagaaaaaaatgaaaggggaaaagaaagagattaagagaatgagacatggttatggctataattagctactgttaactgtcactgggaaggacttgtctttgagtacacaaagaataatgggcagacttactttccattaagatgataggatgaaggtgtcaggaatgttttctatgattttttccaggccaccccagtagttggcatctcctcccctctcccaatcccaaatttcatcctcaaaggtacaacactatgggatataagaagccttgttaagtgatagtagaggaatactctttttgatgtgtgttatttacttctaggtattaagttttctcccccaagagtgccatccgcgaatttgtagtgtttgtattctcactagctctgttagccctgttaaccaagtgaaatctccatgtgagaagccagagggtagctatcaaatcctaccattcagacactttatggaaatgaactgagtagattacaaaaggaagagccaaatgccaaataccatcctccccacatcagtccctaggttgacatttaggcaacagcctctgagtctatgaggttttctgagattgttcagaaatctagccaaggttactaaaaacttcaattcaagagccagtgggtctttgccacttacttagtgcttcatgaatatgcacttcagcatgtaccccttcctgttcttttttttctctttccttttctctgtgatttttatacatgatgcccagctcactatgggtccagcacaaggaaaagaggtatcaagtgtgagaagaatatgtgacagctggtgccatagagcccccatcaagggggaaaaaaaaaaaaaaacagaataagaccaatttcagtttttcctacagtgcttggaaaatattagctcacttgtaagccaaatttgggtgtactcatagaaagcatttcaaggcacagaattgttatttagctaaatgtgccaagtcaattcactcaaggttacagtataaccatccatttcttctttactctttccttttatgtttaatgacccctctcaaaacgggagatggtagaaaaatacacccaactttttgctgttcatggtgctaacactcagggaatctactatgacagtcgtcctcaaattttaataggtgtaagaatcacctggagcatttgttaagatagttttatgcaccccttctgattcagcaggtcagatgaacttgcatttctaacatgtctgcaggtgatgctgatgctgctggccctacaaccatattttgagaaccaatttgtacttgatctcccagaggtcccagtggaaatgagccccagttgctcacgtagtaacctactcagtaactcactctttcttcacttctttcccttccccgcgtgatgttcctattcctctaaccagtgttttctgggatcatctccctaataaactattttcactcaaatctcaggctcagtggccatttctgaaattaattcaaaccaagataaagacagagccacagggcaaataagcaaaaaggaaagcaatgggaaacgtctcagcaggaggctgcccacgctgctgtgcagagcactgctgcagcctcagggctcctggaagtttcagcggtatgctctctgcaagcctcactccagactcagtctcaggccagagcattaggtggactaagccttggactaatgctgcttttttggctgcctaaatgcccaagttcaaaatatcgatataatcttggatttctcactctccatttccctttatcatccaattgatcatcacatgttgccacttcagcctctttacttcaaagatgtttcctcatccacatcctctatgtccagttcaggccctccctcatcctttttcccttggcaaacaagagtcaagtgactgatgtctctgtccttagtctggtctctttcttttttgagacagattctctctcgctctgtcgcccaggctggagtgcagtgatgtgatcttcactaattgcaacctctgcctcctgggttcaagtggttctcctgtcttggccttctgagtagctgggaatacaggcgtgtgccatcactcccagctaattcttgtatttttagtagagacgggatttcaccgcgttggccaggctggtctcaaactccttacctcaggtgatcagcccaccttggcctcccaaagtgctgagattacaggcataagccactgttcccggccccctcttctttacatccttaatactgatgctagtataaactttctagaatgaaaatatgaccagtccctgaaaaccttctggtggttccttggataaaggccaagatcaaagaaggccatctataaccaaatccctgcttagttctccagtctaatctctcatttcttccaagcatacactgtacacttaagtcacatcaatttactttcatgatcctatacagatgctctctttcacctccatgcttctgctgacatgcctggaactcacttattcaacaaatattatactgaactccaaatctatgccagatactgttctagatggtagttatatagctgggaacaaacatgataaaaattctgccctcagggagcctcccttctcacatggtgagacagacaatatacgaaatcaataagaagaatgtcagatagtgacatgtgccaaggagaaagaagatacagtgcgatagaacaagaagttcaattttaaatgggatgtgaagggagccctcaattaaaaagaatacatttgagcaaaatcctcctggagagaggcagtgagtcttgcagatatctgagacaggttgtttcagcagagggaacagcaaggctgaaaacccatccttgttctccttttcctgcctggattcccttatctaattcatcctccaggttggatctctcctgctacctggagccttgcctaactcccattgtccattctcaactaaacatcccacctctgtgctctgagaacatctggccatgtgcttattacagcatttaaaatattgatgataataaattgcagttaacatgtgtaacgtacttactgaaggccaggtattgtgtggttcacttggatgacctgctttcaatactcatgtcactgtaagaagttgtgtatttatattatctcattttattatctcatccctgtctgctttacaacaaggaagaaattgacacacagagaagttaagtaacttgtttaacatcaccaagaattctagactgggcttttggataacagggacaatgtagctcccatatgtgtgcccttcacaatggtctagctctcaaaaaggatcactagctcaatgcttcaaaaagaccttaacatattcatttagtaaaatggaacttctctctgtatcttaccaaatcatgatcacatgaatctatacatgtttgatgagtatgtttgtgatgtataacttaaaagtgaaatttatttggtgagactctggggtcacctcacaaagaaagactggcatctttcagagaagctggtatggaaatgaatgcaaagctgtttggctgcaaattgggagagacctgctctatgaattaagactccatagactgagggaaacagtaatggtttcaatgaaaagctccaaatggaaaatcagatgttcagaatcacagatgttgatgtatcatcaagccgcttctcacatgagcacctccacattgctctccaggtgagtggcaagtctccgggtgagtaactccagggagttatttatataattatggtcaacaattctcccaagcaactccatgtgggcttgcaagtgtctaatatttgtgaagttctgccagctaatcttaccatttctcagctccagaattgtactacctgtctttctagcctagtgtttcctaagtggcaatgattttgccctttgggggatattcagcaatatctggagatgtttttggttgtcacaactggtggggtcaggtgctactggcatctagtgggtagaggccagggatgctgttaaacatcttacactgtacaagacagtctcccgcaactgagttatccagtccaaaatgtcaacagtgccacagacctgtcttgttgccttttataatccaaagtagctccctttggttctcacccaatgatgtgtcaagagtataagcactgtccttgctgttgtttactggggagaattattgttgcattacatacatttcctgaagttgaattgggatgaatcattggagcaaaaatgattctcaggttgctgcttcagcctggcatgctcttcataccctgtccttggggtgaacactaattccccttgaaactcagaagtgccacttccaatatgaagacttctctaacaccccacagggagaaataatcaccttttcctttgcaccccaaccatatcccgtacataattccagcaaagaaaccataatacttcattgtcattattgttacaagcctgtctcctttaccacatccccattagcccttcactggagctcagagaccatgtcttactatttttcatttcccatgcccgtagcacagcacctggcccttaatagacatttaatgcacgtatttgaaatgaatgcattttcagggagaaatctggttctcgcagttgttctacattcagctactctaatttttaccataaatgtgactttcttctccagtttccaaatagaataaaagccaagcaaactacgtggcccatccctttgccctcagcctcatggcccatattactaatgttcaagttcagaagacatttatccaaagccccaaaacagcaatatgaaagtcctagtgatggtgggaaaggatgataaaaataggctgcttaaaaatcaagcacttttgcacagaaaaaaaaggagaggcaaacagccactggcaccttcctgtgagtaacagaagtttctattttaaaagaaaggcagtcaaataacaagcaactttatcacaatgctgctttcccagattttttggccaaggcaacacatcagcctggatcagactcttggcattccatgatggaccccgctccaatgatgattcatagcagccatgtgaggaatggagactttcacacgaactcgcctcttaaaaaaaaaaaaaaaaaaaaaagccagctattgctgatatctccagatatcagccagtaaatgcagctctgtcaagcctgcatgtggcactcaactttcctcggtaaatgacaaggtaagtgatgaggtggccaaaggcctggcctctcagtggttccccatcattttactctcaggtagccaggatgtttcctctcttggttcagtgttcaagtatcccagaagtttcatgaacacagtggaaaaacaaatctaatccttgttttctttcttcactcttaaactttctttggttttgagtaatctgtgtagcttttggatggctttcacattaggaatttaaaaaaaaaaaaaagttccccttacatcattttgacttccaggtattaaatagttgagatgtctaagtttgtttgtgttttcattaagttaacgtttctatcaccgtctgctcctgataggcttcaagaaaacaatgctgaccatttaagaataaaacagcacagttcattggaaggaaacagaagggatgaatgctcctcgtagcctaaaccgagttgattatcattcttgggcacaatgttggcttcaagttttcctgaagctaagccagaaaaaagaacagattgcaagtgtgtgcatgtcaacactgaggaattcggatattgaaaagcggggaggcaggcccccacatctctttcctgagaaaggctcaggagcagggggagcagcctcctgtccctcctaagagtgggcggtcctgccctacacaaagtctggcgagaggaggaagtcactctgggactttcccaatgataatggcaacatgtcgctggacttctgtctaaatgacgtgctcaagggcacagatccaaaagagaaggtctagaacccaaaatgagagcctactaggcaggacaagcagggtgctttttaggtctgtgatgcctgacttttaaaaagcagtcccaccatggaatttctaaaattcagttgattctttcaaaatagcgaagccaggttggtctcaaactcctgacctcaaaccctgtctctactaaaaatacaaacagttagccgggcatggtgatgggcaccattgcactgagtgacaagagtgaaactctgtctcaataaataaataaattaattaatttaattaaatagcaaagccctaacaacccagttgctattataagtatctgccacttattaagcatttttcagtcaatcctcacaataacacaataaaaaaagtaaggacacttattaagagcttccaggtagcaagcacggttccatgctctttatgtacttacatactttaatgcattaaactctttcaacaactccatggagtatttactatgaccccagtcttgctggtgaggaagttgaggcacagagttatttaatggtgtcaccatcacaggagtcctgactgggggaggtccagtatgaacctagatttctatctcctagatcatgcctttatttatttttaaataacagctttatttttatttatttatttatttatttatttatttatttatttatttagagatggagtcttgctctgtcgccaggctggagtgcagtggtgccatctcggctcactgcaacctccacctcccggattcaagcgattcccctacctcagcctcctgagtagctgggactacaggcatgtcccaccaggctcagctaattttttgtattttagtagagacggagtttcaccatgttggccaggatggtctcgatctcctgacctcgtgatccgcccaccttggcctctcaaagtgctgagattacaggcgtgagccaccgcaccctgccaataacagctttattgagatataattcatatatggtataatttattcttttaaagcatacaattcagtgattttttagtatattcagagttgtgcagacatcaccatgatgaattttagagtattttcatcacccccaaaacaaaccctccacgcattactgatctctcccatactccttcgttagaccttggcaaccactaatctactttctgtctctccagatttgcctcttctggacattttctctaaatggggtcatataatatgtggtcttttatgactggcttctttcacttagcataatgttttcaaggttcacccgtgttgtaacatgttttagtacttcattactttttattgccagataggtcacaggtttaactgctacactgtgctcctctgaggctggtattattattctcattttacacacgagaaaactgaggctccatgaaataaaataaatgacctaaagtcacacagatagccaaaggtggatctggcatctgctgaccccaaagtcatgcctcaaaaccctgccctattgcctccacagcatgtccttccttagagaagttacctgcacaagggaatttagtctcacgtgtcctggtaactttcttttaacttccatgaaaggtgataaagaaatgattaagaaaatgcacttcagaattaagctcaggaccaagctgtgtgactttagacagatcatttaacctttctacacctcgatttcctcatttgtaagagaagaataatgacatccacatcttagagttcaaagacactgattgtaaatagtgtggtccagtgccaggcacacagtaagggctcagtaaatcctaattcaatcaattagaacactgttctggggcggggggtaggcattgaggcaagtccaggacaaagaaggaggttcagctgcggaaaaaaggaggaaaagagagagagcgataaaattacgttgtatgagaatgttgtggttgttttcatgcctgtgtctctaagacaaatcagcaacatggaacatttgcaaacacttgatccacaccaagacgtctggagaaggccccaagggagagctgctccgttctgccctcccttcaggccagctgggggtgcctcacttgtttccaatcctaaatcatttgttgtcaaagaattcaaaaattttgagttggggggtggagatttcagttttcattctctgggaagccaaaataggctaaaacagtaacctcaacacaagcatgccaattacatattcaatcaaatttatttctgcattccacttcatgcaattagagaagataagtactagtttcaggatacacagtaggtttctgagtttttaaattaaatcatttataattaattgaaaattgtctttctcaaaagcaatgcaagcctacttttgagatcttactagcaggccctgtatcaatttggaaactgcagacatacaacaagggatatggaaaagacaacaactaaaataagctctttttaaaacagaagagaaagaggcaggctatttaatgttacaagctataaaagagcaagttatttcaatcactaaatgaatttaatttttggttttttgcctgcaaataaagccttttattcacttattcaggtaatgtgcacctattggtaacataccgattctgctgcaggtttcagagaattcattctttgtcaatgaaattttttaaaaaacagttgtttatgcagggggaacaggaggaggtgagctgatttgaggacatttttcgatggttccgttcatgctcaagaaaactgtacatgttagacctaaatcattgatctacctagacctggactctgcacactaatctaaaatgtttatattttggaaagcagagggtgagggaagaagcacattagcaaaggttgcttggcaccatcccgggctatttaaagatcatgtgtgcattgattcaaagaataatttataagcatctattacaataaagactagaagctggtggctggagaattttcactgtagtaaaccttactttggtggccactaataaaccatgcatgccagcacccatgactggtgtcatcccctcccacaccccatccaatggatctggacttgcccatgggactggctttggccaatgggatattagcaaatatgatgtaaagagatgtttgtcttcttggaaagcttgttttaggaacaaacactcttaaaacctagactccgtgctgtgagaagcacaaattaaccataagcgggagatttgaggccctcgctgagagcctcagctgagttctccaccaacggccaacatcaacttgccttgcctgccatcttggaataatatcctccagcacctattgagcctcccctcatgggtcatactagccaatgctacattgagagagatgagctgatcctgctaactcctgttcaaatttcagaataatgaatagaagaataaacgttgttttaagccatcatttagttttgcagctttagataaccaaaatagtggtctgaccatagcaccaagcacagatgtgaagtgaactctgctcttccagcccaatatgcaccttcctgaatcaccaagaggaagagagcctgcctctgacctacactgagagtttgagaaggctggcttatgccctgatattcccaacaatattctctttaatatcaacagcaaaagtatcatttattctgctctttttaagtgccagagactgccaagagctatcaatgtacacatatgtagcatatcattttgtccatacacagcctgtgagaaatgaaatatctctataagaaggttgaggaaactgagacttaacgaagttaaataatttgcccaagaggttccaggcgacgttccagtaataaaattaagattctaactagtcctttactgctaaagccagctttcacccgggatatgcctcctttacactaggaaggcattgctgacccacttccatagcctgagtctcacattctgttaccagcagaggggtaactactaaggggattctactaatcttacaacactctctagcctttatcttcccaagcatacatttttttagtagttgccaaacatcaggcaacttctgccttctaggaggggaaaaaaaggaacccattcttggcaacatcccactcctcataggtgttctcatccctggttcatctccagccaccagccacccacctcagcttcattaaagagcttgaatcaccaatgggaaaacacccacccctggcctgacctgtcacaaccatactccttgatgttctctagggaaatatgcacacaggggacagggccaggaaaagaaagtgttgttactggttgaatgctggaccccagatgtttgtacatgccagtattgtataatcataacttttatttgcactaggcaaccaaaaaaaaagtttgtgtgactttctttactgcaatatttgctttattgtggctgtctggaaccaaacctgcagtatctctgaggtacgcctgtatgtttcaaatgttaataataataattacaaagggacaaaagagggaagatgggaagaggaggagaatgaagatgggtttatgggggagaaagataggagttctgaggttgagatctactgttaacactccttgtcaatacagcatgccacccactaataataattattcatttttaagtctatttgacctgttaaatagtgaattcattgacaacagggatcctgccttaggtaaatttgtaactccatcttatacagcactgacatatacatttttaggatgatggagactgaatgaatattttttcttaatttctacagttttcctagttgctggcaccttggccctgtgtccaaactccttgttccaccgtttcagcttctgtgggccataaatcatgatatgacaggaagacattgagaaaattgtatttggccaagatgcagaatcccaaagtcttgaattatgccctcccacagactcccttttcaaggaccaaagaagatatacgcagagaagaacagtaaaaaacacacagttgttacatgagaatttagcatagtgaacaaagctggatgatgtgaaggccctgcccagcctaaaagcagacctaagcaggccttgcttcttttccctctggattcatagccacgatgaggggaaatgagtccttggagaatcccaccaaggtcaagcaagccagagagcatttgccctttttagctggtctagtgggcaactgcagggcatccctagagcagagtaactatcaagcaggtgcagcatggagcctatttctgcacctgtcatgaggaagaaagagagaaggagaaagaatgctccaagagatgacaaaggactccagagaaactgctgccacttgggacccagggcggatgccccttacttattagcaaagatgttcaagcctctagcattgtggcacagtaaatggccttgaccttaatccattatcagcatttatccttgaggatacaatttggagcttggtgtagaagaggagcttccctcagaggccaggatagctctgaagacatggcgatttgtttttcctggtacctgctatcttactttgagctgtggtacttttaccttactgtttcttgtttttctaccacatctttgcatctttgcatttttggtcccatctctcttgaccttgaactcaacgtacatgccttatctctcatgagttctctgtgttcggtcttgggaaaagagaacaggaattttcttccagtgaattctggaatcttcatttgtcacctttctcctcacgttttccttgctggaagctgcacacacatactcacacaacacgcatgcatccctttgccttctgtggataaataagattttgtgtctcagagcacaatgctctcttgggctctaccttttggtgatatttttgaaatcaatttaaagtacccttgatatcccttgaaagttttgtaagatttaaccccttaggggaagagtcagagggcctctctttacaccttacatccctcaccctttcaatcccttgggtaagaagagacatctgaaaggttgagatgcagtctttactctgagaacctccctccaaaactgcttcaactgctgacagctcacaagacagaacgttgagttaatacccaatattaaacaaagtcaaaaatcaaatacatcaatcacctaactaaaagcacatttcaaaggaagacatagccaactggatggcaatcctgagcaacacttgccttggcaggtatctgatgaagacactgctctgtcttgcttccaaagtccttctaagcaggcagcttggcaggccagtcttggatggagagggatgcctccagtttccggagccagagctgaggaaggagaaagtagaccacctgcaggcagtacaacactacttcatacttccctaatgcctcactcacattagcacactgatcttgcctatgaccttcactgagctagatcaagatccccatgctgcagtgggaaaacaaatatccattgtctactgatacccactgggtcacttttgcttttgaattcttgaaatctggattccctctcagtgtcctctaggttaccagtacacttatcccctccaaatcagggcatagttgcaactaagcaattaagagaagactggagaccagtgggattggaaggtaatggtgtcactggagtttctaggcttttatctatccagacctctccaatgtcttgtcatgcatcaattctctcatccgatctttttgggaatgccctcatcctgggttaccaaggagcacctgaagcagaggataagtgaatgcctttctcaaggcacagggcaagacattggtggtcttgatttgctccatcaaccccacctcccagatttatgtttgaactgtttgatcctggtgctcacatgcaggaacaggacactggagtgtgaaacgacaaaatacacctctttcctaaagcaaagcaatctatcttgagcacaaagcttgtcatgacactaaagcaaatcagtgtaaacaagggcagagatgagaaccataatgaagagtttgagaaattgtaaagtggtcctgaaaggaagtggtacctcttgagaatagtcctataaagtgtatacctgtcactaaaagatgcccaagacactgaccttaagccaattaccatgtgtagatctgctgtaaccaaagaaggtcacagatattcgattctgcaaaaagcagcttttaaaaataaaagtcaattcttggcatgtgttgcaatacttcccctgttccaaacataatactgaagccacccacaggaccgctgtcttagccaaatacagtaaggaaacaagccttctcgggaaaggcccacatgaatagtatccaagggccaaggtcaggtatcaatgcaaaccggctgcaaaatctcctcttctagcaccactgggcatactgtagctgagtaagccagcgatactctgtccagctttctcaaagtgctgctcataaagacaattccatagactacagggacagatgtccgctggcactcagaacttcagactctggggaaggctctgcccagtttttgcctgtgaactcaatctctataaaacagagttatggcaattgagaaaaaggcctctcatacagtctccatgtaatccagagtatctgctttctgaaataatttactgatcttttccctatacaatttttttttttgagacagggtctcactctgttatccaggctggagggagttcagtggtgtgatcacggctccctgcagcctcaaccttccaggaccaagcaatccttctacctctttcccccaagtagctaggaccacaggcatgcaccaccatccccagtgaacttttttattttttgtagggaagagttctccctatgttgtccaggctcgtctcaaactcctaggcttaaatgatcctcccacctcggcctcccaaagtgcttggattacaggcgtgagccacaatgcccagccctataattctcattgtcatagctagatcattacatgcaggagggcagagacgatccagctctagaagcaactttaagccattaggactgactgcttccctccaaacttaccacacacttgggttcaaaaaaacgggaccatatttcaatgttttgcattattcatgccatagtcctgaactattcactctaattcatctcatttcttgtttcctgcactatttttcctggcttttaaccttctagtctgtcttctgacggatgatctttccttgcttcttgaattgggtcctgaacctgagaccttcttcagcagtgggtaagagaactggctttgaagccagtttttctttctttttttcatattatactttaagttctagggtacatgtgcacaatgtgcaggtttgttacatatgtacacatgtgccatattggtgtaactcatcatttacattaggtgtatctcctaatgctatccctcccgcctcccccaccccacgacaggccccagtgtgtgatgttccccttcctgtgtccaagtgttctcactattcagttcccacctatgagtgagaacatgtggtgtttggttttttgactggattaagaaaatgtggcacatatacaccatggaatactatgtagccataaaaaaggatgagttcatgtctttgtagggacatggatgaagctggaagccagtttttctaaattcaaatcctgatgctgtcatttattaacagtatgatcctggacaagttattttaattttctaaactttaattttcttaactgtaaagtggtgctcataatagcacctacctcttggtctgcagtccagtgctcctggccgggcgcggtggctcatgcctgtaatcccagcactttaggaggcggaggtgggtgaatccgctgaggttaggagttcgagaccagcctggccaacatggcaaaaccccatccctactaaaaataccaaaaaaataaaataaaaataaatagccatgcgtggtagtgcacatctgtagtcccagctactggggaggctgaggtgggagaatcacttgaacccaggaggcggaggttgcagtgagccaagattgtgccactgcactctagcctgggcaacagagcaagactccctctcaataataacaataataataacaataatagcacctacctcttggaattcttgagaagataaaatggtttatatccaaaacaattagaacaacaacccagcgcagctgaattgctcaataaatgctagcagttgtgaggcatttttcagccacctctacagccatgtggacactttagtcagcctgagagaatacccagtacaggtcatctcccagatattttatacctgataatccatgctaggttcactcaagcaaacagagaagaaagcatttatttctctttgctctaacacagaggaaagcattatgataagagctaagattttcttatccagtgattaatttcttattggatccagctatttaaatggagctccacagagagttagttaaattaaacacaaaatttcttcttttttttttttttgtcaaagaaacacttgccttgctcttcactatatagtaaaactcactaataaaccacaacatgtcttacatgtctgttcctgatctccatacttgagtggtcaccaagaaagtattgtacattcaatccatagcatttaatttccatggaccctgcctttaacaggttattatctggttgttaagagaagactaacacataagacattatcaaagaacaatagaaggtatataattaagcactgagccaagtaaatggtgccgattataaattcagtagttctggaaaggacacatcaggtaatgggttatagtaactcacctattcactcaacaaacacttactgagtaccatccaagtgccagtttctgtgctaggctctgaacgtaggtggaggacattgggatctttcttccctgcagtcttccattctttcctacggccccccatggtataaccatcatgcagctgggtcattcattcttctgagccaagcatggtaaattcattcaccttgtcagtgattggttcctaaatgaccattgatgttgagaagaattggcttgaaacttctgggaaagttcctccttggtctgaagaaactatcccaggaagacatacaccttttcccttggttgatgccaagcatggatgtgaagtccttaactaccacttacatcttgccaccagcttgcaaatagagaagcaagggcaaaaaaaaaaaaaaaaaaaaaaaaaaaaactatagagaaacagagtcagtgccattagattaagtcaagttttcatagacccctacttttgggcgtccagtaaaggaatccagtacatttccttattcacattagcttaagttttgcgcttttttttttttgcccctgttatttgcagtcatacatattctaacttatagaacacatgaaaaagacaaatgaaatacaatcagttctcaaggtgctcacaggctattgttaacaaacatgtaatcctgcagcattgtaatttgttagttaagtacaaaagaataatggttcaggaataaaagtatatcaaaggaaggaggagttggcaagatctaagagaggtagctttaccaactttaattagtctttgaaggcagtcagtgaataatgataaaacagtgagtaattggcaataccccagcttatcactgcaaaaattggcttaattcctattgctttgtcaatttcagttgttattactaatgtcttaagatagggaaaggagaatctcttcctagaattataagctaaagaatatgttcctttagtttgattcctgtttctggattcagtctggaagtttctgtttgcaaggctttttttttcttttctttttttcttttgagacagagtctctctctgttgcccaggctggagtgtagtggtgtgatcatggtcactgaaacctctgtcttctgagctcaagcaattctcatgcctcagcttcccgagtagctgggattataggtgcctgccaccacgtccagctaattttttgtatttttagtagagacagggttccaccatgttgcccaggctggtctcaaactcctgacttcaagtgatccgcctgtctcaaactctcaaatttctgggattacaggcatgagccaccatacccagcctaaaggctattttttatctctaaagatgaaactggcttcagaattatagaaaatcagaacattttacccagtgtgcataagttttcgtaattatgtgcatgtaaggaaaaaaacattttttctgtttgatatcattagatggttgaaattacactttcatctatctttctctacagaaagagatttttttctgccagctaaaaaaaatccagatattcattgactagacttgtgattatctattttacataagacttgggcttcatcgtataacttaactgtaatattgaagatttccaagttaaatttgggaaacaatgttaaagccttgctaagattgtggttaggagaagccgtagtatagaagctttatttagttgagcttcaaatgctcaaattaatttccagcattttccaatgtttataaataaaatcattgctcatggcaatgtttccgtgatgggactttctgaggaagtctctcaggagaccactcaggtccccagagttggttagcagctccctacatgctgtctggtgtgctaggaaataaatttacagatattaaaaacctagattttagaatcagactgacctgggttcaaatcctggttctgtaccttattagctgtgttattttgagcaagttacttagtctccctgtgtcattgtggtaaaataaaaacaagctaagattattttgagaattaaatcaaataatatagtcaagtttcttaaaagagtgtctgacattcattgtctttgaacaaatttattgaactagagacataaggcagacaaaagtaacccccatgaggcttctgtaacaaatgctcaacaaataatatccaaatagccattattatttttaataagatctgtttatttcctgggacataaccattatcaagtgctcggagagaaaaatcaaagaatgatcatagattcctccattgcctcctgcctcccagcccatatccattctatcatgtcatgctttgagaatgggtcttctccacttcacctgctgccatgccagtccaggaccgttatgcaaatcatagccctttttttgaacttcttatgaccatcttggccatccattcttcttacatccattctgcacatactggttgctgattttttttttttaccattaacatcattgattttatttgccccaaaccttcaaatgacaaaccattccacgtgaaattaatgtcaactcttcccacgtttcttgagcggggtgctgccttacctcttcttaacatcatgcaccctgtatagcactattttctagacaccctagccttcctgatgctccttcagcaaaccaaaagccgttgctctcactcttctccctcctatatcttcatagagctggccccttatcatgatttgaaagtcagctcaaatggacttccttaggttgttcttctgcagccggtctcaaaataataccctattttgtcttcttcataatatgaaatgagtttgtctacttatttatctttctacaacttctgtagctttctagaatgtaagatgctataaaggcaaatacctcatctaccctgtcagctgctagatcccttgtgccttaaaagagtacatggcacatagtaagtacataatgaatgtttgttgactagtatcatactgagactccaaatgctgcttcagtttattaacaagtttcccaagtcatttaacttcctacttgggggagtttagacccttagagttatgagttcaaagaacagagacccagggaggtgatgagtcttacagaattagttagtgttagagcctagacaagatccctggggcttctaagatctagatgagcaccttgccataatattggtttgctaggcatgagtcctctgaccctctagattgtccagaagaaggcaatgaagtttgaaatcatatcaatcactttcaatggaattaagacctggactgggtggaggaggagaactatgctactgaaaccaaataaagatggtacaagggcagagaaggcactagagtacagaatcccacacacacacaaattacttctttatcaccatgagtggaaggacctcagattcggagctacaagttgtcaacattcaaagcatgtatcgaacactgttctgattaatagaattatagaatctcagcatggaaagataacccttctcacatgttttacaccatttacagtatgtctgcctagaagtcatccacctcactttaagtatctacagttaggaagaactcactgaatcccaagtaagcttattctgtctttcaacagctctgattataagaacatttttcattaaactgggctaaaaaccactgttgtatattttattgattctagttttgccatgttgggttatctaaaggcagctatcatgtcacccccgagttttcctttgtccaggtttttctaatactttttctatggaatgatctttcattgacaaaaggtttatttttgctggtctttccctctctacatggttggatatatcagcattcctcatgaagtaggtcttcaggtataggaagagcagtttagaagccagaactttccttgcactggaaattatatttatgtaatgtaactaaagttattagtctatatgagtactcgcaaccacccccaagccacctccagcccattaaaaataatccagcattgacttctaggttcccactccctcccagtcctactaaggaaggatttttgcttgctgagagagaagctaagttgacctacataataaagtgataaaggggttgtggcctggttatcaaggaagagtttttttggagctcaagtttataagaaggaaacactagagcaactgcgggtataagggaattggagagaaaaagaaaaggtggcattatgaagcaccaaggtggcttagtaatggaattctcttagatgttctccaagaaattcaagtagaaatttctagttccttttaactgcctttagttgttacactatgttcccttgaatgtgacacaccactctatgacaacagtggtcactgaatttataaagttatgcacattaaaaattaattccatagcaatgataatgatttatacgtacaattatttcactgtactaaggagttgacatttattatctcatttaattcttagagcaagcctttgagatacatgctattataatccccattttttcagatgaggagactgtaaaacagaggtaaaagaaattgtttacagctaagcaatggtatagttctcagacccatgtctgtctaactctaaatcccgtacattatgcctcatggtagtccttgagcagaatggcctcagtgcttgtccagaaagaaaaagataaacagctagagggatgagcctggaatccaggaattatctgctgctccagggagaccatactacctaaaacctgtctcaaggctgacagtccagcactgagatcattgagatcagaaacaaaatcaaactgatattgaggtttctggaacattccttagaaaaagatccaaactttcaaaaacttcaatcttattttccacaatattgatggcacaattttagcccatggctatttttttccttcttgaacacatcaattcagaaactttaaagaacaaaattgtgttcacaaaaatgtaattgataaaactaactctttcctagctgactttttatggcttcagctaaaattcaagctaaactgaattccataatggaccatacttcataataattgtagtctatttgtatgcaaatagctgaacgacatctctcaatttcagactctggctgtaaactcacatcagttttgggtagattctaattatgaatctgatataataggtgttgaattaatgagaatctctgacaccagttttgagagttaacactcattattcactatttgaaccttaaaaatggagtatctttatgatagaatgtattgggtggtaccattatctagtaactatttgatctgaaatggttatttaatttcttccagaccacagtgttagaaaaatgagaataataatgattccatgataggattattggataatgaaaaaagataatgtatacaaagtacttaggaaaatatttgtggatcaataaattacagttttttctgctctctgttgctagatcagctgaaggtccctccaagtggccaaaacttagtaactccttcataaggcattgccttgctacagatgtcctcaaaaagcttccttccgtgatgagagcccaactttaatgtgaacacagagacaatctttaataagaactgaggaagcaggaatcaaactcataagacagggccaggtagacacatacataaggtctgctcagggtcaacaacttgcccacctagtatcacataacaccctctggcattaatgatgcccatcctgccttgcatttctgaggacaagggccatagaaggaaggcaacgttctttccaggggatgtttatttttccattaataaagggaaattactttgttggttgagagcccagattttaaaattactcccatggctgtatctaaaaccaattaaatgttttaaaactcaaatttgtttggcataatagagttgaggctgtcagatcttgtgacatggccagtcataaaatgttccctgggaaccgaatggggcatactggggggagtgggaagagagaaatcataatcacttatgttcagaggggcatagcaaatgcctgggtcaaacccagcttctgagaacaggaaaaaatccatccaaatgggtggaagatggttatcctacttgttggcagtatagtgtgattaaaggacaccaggctttagaattggacaaacagatcttggctcacatccgggctctgccctttattatctgggtgacattgggtaagttactgaccttgccaagcctcaatttcttcagttgtgaaatgaggatcataatattaatttttttatggtggctaggataatgtaagtaaaacacttggctcaatgcctcatggattataagtgctcaacaaatgctagatgtagttattgtcattttattgttgtcgtttgtgtgttagcagctattatgtactagttaatccacctattttgtctcttttctttaggataaaacaccctgtgatgttactattaacataccattttatagaggagaaaactggctcatatatccaataccacatagttaagagaaagcagagctgaaattagaacctaggtctggctgatttcaaagcccatgctatctccgttgcttccatcactactgtggaagtgaaaagcttcacttgtaagatgtgggctgtaatctaagaaaggctttgatatgtgaaagtaagcaataacaggacatcctgacaggtgagtatgtagaatcctgggggaaatttattcagagatctggacaaacagggctgtgttcagggatatcagcaaagtcgatcccaagggtggattcaagggctcaaggttacaaggccagactcagaacagagctggctcacacaccagggtaggtggctccaggttacccagaagcccgctagggtttttaaagcccctgttggcagagggaagaactaggttcagggtatggggtggcaccagctaatctgcaagtgggtctcaagtagatccagatgtggggaggaacagaggagaagcaagaaatcaggcaagtcctgacatcagcaacaactagtcgattgatgctttttttttttttagctttgcaacagtttccctgaaattgtgcagacagtcttaaacctgtcaattctggaggctcctgatttatatatgaacactgcactgtcattctccaagtgcaaaactacaaaatgcaatgtttctttctctttatagctatccattcttccatgaccttgagtttaatgacagctgcttctctagtttttccagttattagggaccttctccatgagcattagcaattctagaaattaggtaacactccctggcctatgacttgcacctgtgacccatgacagaggcagaattcatctattgcagagtcagcacatatggaaaaatagatgaagtcactgccttatccatgtccatggcagacattattaatcaatcacagcactctttgtaatttggcctagaaaatcttcacaattatgctccaaatctaatcaatggattagatttagcacatgataaaacttactgaccagtgaagcctagtggtttacctttcaataaatcactgaattaaaaataaagctaataatggcagttttaaattgactttctggttaattgtacaaataaatgcctaagtacattggaatctggacagaataagaaaagcaaaaacaaattttaaaaatcctcattatagaagaaggaataaggaactctgaattcttttattagctatctgacttaattcagctatgtgagcttctactatatgtcaagctgtattctaagaactttacatgttatctcatttaatactcataaaatattaaatagatattttcattgatttttttaaaaaataaagaatagaatattaaagaggctaaataactccataaagatcatgcaaggtcatcagagatagcaatgagatttaaatccagtccacctaattttgcaaccagtgcccttaacctctacattctatactgtctaaccagatatataaaggccaaaagaaaaagaaaaaagctaagttggcaaacaatgggcatgccctagattcagaatattcttaaggtgataggagttgctaagacagcagcagttctttcaaggcttcacatcagtctgcccccttggggaccaaagagaatcaggagccatggcagtgcaggacaatcatgctccacaatcccaatggattgggacatcggaaaatttccctttgggaaattctgttccagcagttaactaggacatgaaataaagactacgtgggcacatggcccatgattttctctgctctatcaggttgactgacttaacagaatctctcttctctctagaggcacatgcatagccccaacagatgcccttgccatgcaagggaggatgaactatgacagtcaatgtcaacccatcaattacaatgtagggatcaatcctaaaggtcttgtcattcctgaagtctgttgtagccaccacctctcatttccttggcttatgagtagttccaagggagacgggagcgcagctgggagctggaggaccccactcctgttcaaatagcaattaaacccctcaaatcttctcttgcagaaagaaaattgtggccactctagcatgagcttcctcaacttgtctccatctctgtttttctctattatcacttttttcttccttttttgtgctttcagaagagaagcatctccgtattgaccaatgctgctgctgctgcttctggtgctctcttctgcagtttccctgggacattgctccattgattctctcctccctatcttaaagagaagagagataacccaggcagtcaaaattttcctatagcctgtaaaacattctttcctttgagcctgctaccctgctattgcctgatctctttcttttctcactctccaccaacattcttgcaaaagtaatgtgcacccaccagcctctacttaatcaccaccactcactctattacccccagaatagcacatctgtcaccacaactccaagagaaatgacttctttttggtcaaccacatggatatttgtatcagattgtgcagagaagacttccgtttataaatgaaagaaactaagtcaccctattcaagactaaagggggaagggagtgtttgtttactgcttcacatgcccaaaccttgaaaagggcaggaatggacctggccagagaacatcatcaggatgctctgtgtgactgcccatctgtctctcatttctatcgttgtgtgccaacagggaaatggggccatagaccattctggtctcacgtttttcattgtgttccccagtttgttgggaaaatccaaagaaaggaatcaattggcctgccttgatttgtatagccacttcttgaaccatttactgtggccagaggaaagccatggcagttggatcagcctaggtcctgcgtctacaaggctagctagaaatgggcagcattctggtattagaagcagctggggaaccacatacatgcctgctggggaaatcataaactctacagccaccatgatttatgtctactaaacagacttatgtgtacagttgagtattgtgcagaataaaataatagatggtggaatggtggtcatcatcaaaatcacacagttatgaaggctgagcaaaactattaagatatatttgcaattctagccaaacatgtatttaagatcttatgtcaagtagacctaatgcatctatgggatctgagctctttgacctgaagggacatccagtagggccagatgtcccaaaatatgagctccacctgcctgctgcttttttgcctctggaaaccccttttagtttcaaattttcacaattcaagtgcaaacccctatgagagggctcctgtcatagttacaaattaacagccctggaaagagtagttcacagacaaatctgaacaaaaagaccctgcagcaacagaaccagaaaactcctgggaattttgggacagtggaaaaaggaagtggagctgcaggagcaacaagtctttcccagcttgaatttagcagacagtaatatcatatgtcaggagagtgctctgacattttctaaacattattatccccctcgaaagaagaaaacagtgaggctgagaaagatttgttaaggactcgtcttgtgtcaggtgaactaaatactgcccaggatttagctcaaccccattgtgcagatgagaaaactaaaactccaagaacctgaccacatttacacagctgcatagtggcaggtttggaattctcacacagatctatttacctggctccaaaagactgcagatggggcagtgaataaatacgataattggtttcagaaagtaggttttttgacttccaagttagtgctctttctgaggagtataccacctttcttatttaaaccataatgttgaacaaagcatttccacaagagcaatgtccttttttctctttacatctgcgaggcaggcaggaggtggatgattttccctactcaacagctaaagggaccaaggctctgatgataaacttagcccagtcaggatgtcattctaaacccagcagggctgggagccctgcaggcactttgcttttgctttctgtaatcaccttcccccgagttcagccaatcctggaaccagggccaggctggctgtgtttgagtgagctcatctctccacgttttttagcttcaattcctcataactgttttacattctgagccttgctcttattttcagtctttcatgaagaaaagttgttacattagaattgagtgactgtctgcctcgttcctcatctcgaattgtatttttacattatcaagtaaattaaaagccatacattacagaaactcatttaaaattctgtttagtgcatatttgcagaacttttgctgattcaatgaatgcctcacttaccaatcatgtgtaaatcagcgttttgctgtggggaatactttagggccggctgaactgacagcatccagttggtactttctcaagtttcaggttatctctagccctccacacctgagcctgggaataagggggagctgagcccaggaaggcagtgtgacttctggggcatgtgcccacgacttcacacctcaagaagaagggggagatggcgcattctcggtagtggcagcatctctggcagaatcatcactattatagtaacactaccaatagccaaaactggcttcctgggcacactacctgtgcagtcatgaaaagcacagtgatgaaagggccccgtgcttagtttaattatctgctattgccaaatgaaatgcttgatcattttttagcaaaagtctctcattttcatttttgcagtacacatcacacagtcaattttgttgacagctgtcacttagtgaagatttttctctaagttagaccttgagcttctcttgcatcatctaatttaatacttacaatattcagttattcaacaaatattgagccactcattaggtaccaagcactgtgctaagccccagggatgctagaataaacaagacaggcgtggtctctaccttcatggaacttacattcaaacagtataatcaaaaataaatcaaaattgtaataactgttctcaaggaaaaaacaataataaaagaccaaggtaaatatattagaaagggttcatttaaaataaagtgacaaggaagggcatttctgagagcctaagaggtaacaattcttgtacccattttacagataaagaaactgaatctcagataggttaggtgacttagccaaagtcatagagccagataatggcactggcaagctctgaaatcaagtctttctgacccaggggccagtgtgttataaaaaatcttttcaaacttcaaataatagtaatcactggggattgtattaaactatagattctgattcttggatggtgctgatattgctgggcccagaaccccactctgagtacaaggccctaatccctgtgttagtggacatggttgggtggctgcagacagaactccagggcactaagccctggaaaggtggttcttgccatcagaagtggtagggctcagtaccagaggggcagagtgggaactcaagggctgcaactcctggaagatttcatgaatttgcaaaaaccctggggaaaagaatgcaaagatcatcctaacagttctgaccaagaactttgaagagggctcacctacaagagaaggagttttgcccccactctacagatccaaaagcctaggtatatcaccttgagtgctaagaaatgtttctttcttatgtccaactacaatctctcttattgtatcttaagctcattttcttttgcaaatttctttaggaagaaagaacacaagcagttagcatttccacatattgaagttagtttcaagtcatctcttatgtttctaagtccaaatctaaatacctcattgcattttatttttgtctttataggagtatgggagtcattttttaaaatctctacaataatcttttttctgattcttctgcagtttttatgagccaaatatgacattatgagatctgactaattcatagcaaaaataaccacttcccagccctcataaaacacacttcttttttccccacaatgtattaaacttatggtcaactatgaatgccaggtctctttctactgtttatgtatatgttgagtctctgttctctgtgtttgtcttttttgttaagtactgaaacaatggcaattgacacagtagctggcgcgtagtagatgattaataaatatcagtgaaataaacgtataaataatcttgaactagtttttgctgaattataacctgtttttaaagtgtatttctgtgctcaaatcattaggaacctccctgaagggggaagtgacctcacttagagcaaagacatgagtgtagaattgcctggaggcatctaataaatatttttcatgagtgatggttgaccaaagaaagagcagagtctgtaattttcgagatgatatagagaaaagaaggactaagaaagactattggactgggaatcaaccagcaaaacttctagcattcgccataccccaaattagctgtgtgaccttgaggaattcattagacttctctgggctacaggtatcctagccaagatacaatgggtggaatgagatgatcgatctctaagtttctctttagcactaacaatctgtggatccatatgaacacttgtatcagggtttagaaaatagaaaccagttgccaaaagacaaagatttgtttagaaatgcaagttatctgtcagaggatccttggacaaaaacagctcttgctttctcctttggagtcatattttccacccttgtggcttattgcaatggtctttaatgcatgcagttttctctgtgacccctttcagtttgtcatgcctagctagatttgtgtggtgcctcatcacaccatttggctctgcgtctgcccgtgtttggttgcaaagttcacagtactcctcgtggtgtgcttgatttgccctcgaaactcccattgactttgtgtactcattgcctgatcaggcccatttaatctgcacaactattcaacacaaagatggataattaaacattctatggatttcagtctcattctccaagatgtaaggggtttcctggcagtactgtctgcctgaatcccttggagcttcctgagagctctcccttcataacctacagataaatcactcttcttccccagaaacacagccactttctcttttctaagggcatctacttcatttgtacctgggccatggttaggatatttcaggtaatttcagctccaggagggcagcactgcaatatcagttggcctccatttacctctgttccttcctgcctgccctctactgagggcctatttttgccagaaaattttgtttttgtttgtttccaatccaatacacaagcttcccacaggtacctaatgtgccatctgcattttagcaaatattatctcctcattcagcctgaatcaagggcttttctcttacatctggaatttgtaggtatgctgtgtgcattggcagagctaaccatgagtggaaacaaaacagcatctgtgaaatgggataatatagggacagaggccaaggaactttgaagtaagcaaaagagaaaactccagctgtgtttaagggaaagttaatcaaagcaacatgtgttgtgtattttagacctactatgtgcctagcaatgtgctgaatgcttttaattatgccaactactcatctcaatgtctccatatagtattagtttcaacttagaagaagtaaggctaggagagaaaaaaataactttctcaaagtcaagcaactaataagtgggttcaaatctaggctttcttttttttaatttgtgtaactgtattgggtagaactgtaattttgttacatacatagattgtatagtagtgaagtcagtgcttttagggtatccatcactcaaataacatacatcatcattaagtaatctctcatcattcatcgccctcacatcctctcacctttctgaatctctgttgtccattccacagtctatgtccatgtagacatattatttagctctcatttgtaagtgagcacatgcagtagttgttcttctgtgtctgagtggtttcccttaagataatgaccttcagttccatccatgtcgctgcacaagacatgattttaattttctatggctgaatagtattccattgtgcatatgtaacacatattctttatccagtctttcatttatgggcacttaggctgatttttgctgttgtcaatagtgctgtgatcaatttatgggtgcaggtatcttttttatataatgatttcttttcctttcaaacctaggacttcttaactttaaaatttatgttcttttccttttttatcaaaccgctatgagagggaagagtaaatgtgaggacaagtgcaggagaggagagggagatacaggaaaggaaaggatgtaggtacattcacagctgcctcaagtggcactcagagtgtgtcatccatgccagtgatctgtcatcaataccagaaactacatacactttacaatttggttccagcacaacaaaagtcaatacatataactctcttctgaatctttcatcatcaggcttcttactggggaattctccaagtgtgcacaagtgtccacatatccccatgacctactttgtagttcatgtttggggtgcaggccacccattcttagtttctagcctttcccacccatgtatacgcactgtgatctctgactgtaagcgagcatgctaaaaatgtagtagcctacaacaacatcatcactttgttattacctctcatggttctgagggataactgggcttagctggatggttcttgctcagggtctctcatgtggctgcaaccagacagtgacctatactgaagacatctcgaaggcttcttcatttgcatgtgtggtggttggttctgtcatttaatggctcatttgtgtcctctccatgtgactggagctttctcacagcacaaggctgggttctaagagaagcagcttgacagatcctctggaagctgggtcaacttttaggccttggatgtctcacagtatcactttgccatacccatagctctgtctagattcaaggagagggaacatagacctcacttcttgatgaaaggagcgtcactgtcacatagtaagaggagtgtgtgcaatggatcttatgatgaccatcttggaaactctattttgccagaatcctcccattttatttctctcccatatgtgacatatactcatcttttctcccaagaccaccgtatcccataccattacagcatcatctcaaagtcaggatctcatgcactaagtaagatatgctgtgggtgaagctccttggattcctctccttgactaccgtttctgtatctgaagatgtatgaactaaagagacaagttatctgcctcctaaagacatcactttttaaacattcactctgtattgggccctgaatctggcatttagatgagttacttatcaacagtcctgagaagtaagtaatattatccctaattccaggcatatcaaagtaagtacccaagaacttgtagctactgagagtctttagctccccaatgaggctagatgaacacacattatgcaagacaaattataaataccttaccatgcagttaacttatattcagtagtattcatttatattcagtagtaattctgaaagtgtccatagaccacaaggagtccctgaaatattttcaggaaactcaagaggttaaaatggttttcataataatattaagactttacatgcctttttcacttgacatttgcactgatggtgcaaaagcatgagagttaaaaggaaccaggccttctcaaagaaatagctgagccagggactggagcaaagtcagtacaaagatgagccagcaacaatttattaggccagaaagtgagaaagtattcaaggaaaaaaaataatgattgggacacatcacagacataggatacagcttggaaggctcctcctggccagatctgggacaattttaggacaaaaataagtaagttctgggaaataatataaacaattgaaaaaaacacaaattcatgagtttaggccaataaaagatagctaaatagatgatagaaagatcataggagaagaacagagggctcttgcttacagtagaatgctaaggctaattggcacacatggaggggatgctgaaactggagaatcatcattttgcaatctccatagttgcaatctccaaagattggatcaggcaagaaccatcattggatgctaaatctagaagaagatttttatgagaagctgaatttgcatggtcttgaaggatctcaccacacactacttattgtggtaaaagagaaaaataaaataaatttaaaattaaaagagtggaaaattaaagactggaaaactcgaaccatgccttgaataatgataacagttaatgttactaatgaaaggcatatggtgatcgtgtgacttcacatgtggcttctgagaaagacactcatgcagtattctggcataggatgcataatgtgaacctaatcacaatgcaccatcagaaaaacacaaaatgaaggatgctctgtttttttctttttataagtggatacatggaggaaggtggcctctactcttaaaaaagtgtcataaaaaaaaggttgtggaaatgtttcagataaaaggaggctgaaaagacaagagaactaaatgcaatactacctgatactggatcttgtacctgtaaattatcacattaggtcaacagacaatactggaatacagacaataaaaatgttatcaatgtaactttataaagttgataactctactgtggttattgaagagaaaattcctcctcttagcaaacaaatattgaaatatttaagggtaaatagccatgatgtatgtaacttaacttcatgattcaggggaagaaaagaggtggggaaagagggtaagtgataaggcaaatggggaaaaattttaaactggtaaatcaaaataaagagtatctgggtgttccttgaattatttttatttttgaaaatttttaagttaaatatgtctccaaacagaaaatttaaaataacaaaagcaatggtggagcaaagcactggtgttttgaacaaattgaggcagtgcccccaaatggtagtaggtgttgtggtgtgttcttcaccaccacatactcacaatttaaaaaagaaagaagaaagaaagagagaaagaaagaaagaaagaaaggaaggaaggaaggaaggaaggaaggatggaaggaaggaaggaaggaaggaaggaaggaaagaaagaaagaaagaaagaaagaaagaaagaaagaaagaaagaaaggaaagaagaaagaaaggaaggaaggagaaagaaagaaagaaagaaagaaaaagaaagaaagaaagaaagaaagaaagaaagaaagaaagaagaatctggtttaatgtttaaatgttatggatgaaataataagaattattaactttattgtgctctgtgccctgagtacacgtcattttaatattgggaagactcaaatattgggaaatgggaagtatacataaagcactcctgctgtgtgctgaagtgtgatgttgtctcaaggaaacgcaggaaggtgtgcacgtgcttgagggctgagctgcagtcgctgcttctgtccatggaattccattttgagttgaaaggacaattggcaggcaaactacagttattcagacaaatgatggttatcaagcagacactctctcaaatatgaaggaaatgagcctgtcacttcaaggaaaacaactgacaagattttttgctaataataaactttgaggaggtttcatgtgataattagaaaacttagtatctgacactatgacacttgacagcttcccaatatttaaatatgtttctgatgagactggtagtgatattaagtactatgattttgtatattgtaaatgaaatgggtcaatatttggaagatctgcattactcagtgaaccagtattttctgaatgatcaacgcatgatgatacaaaattgtgcctgggcaagcctcattcaaagtgtaagaaatactaatggattttaatgtaactgagtataaaaagtttattaataaggtttcacagttttaagaaactactacttattgagttttggtatagtatcaagaaagaatctccataattatctgaaaggctattaaaatactccttcccttttctaccacacatctgtgtgaggcaagctttttttcgtatactttaaccaaaataaaatatcacagcaaagtaaatccaaaagcagatatgagaatttctatgttttctattaagccagacattaagagatttgcaaaaacagaaaacaacttttgctcttctcactaatgttttttattttggaaaatacagtaattttcgtttttaaaatatatcatttatgttcatatgaatgagtatactgttgttacttatagatgaattaataaataaatatatttaaaatgttaatttttaatatctaacatggaatctacaaaaaaaaaagctctttgggatcctcaataattaagagtataaaggggtcctgacatcattttgtgttcttaatggaaagggtggtaaactcaggtgcctgtgctcctattatggcagctgaagccgtactgggatgctgcctctacaggtgcttgcgttaaccacacagtacagtcaagggcaggcatgtgacctaagcttggccaattggactttttcttctggcattttagttattgaatgaaatgaaactacagtagaagatatagtgtatgttcattcattctagtttttgagaccatatggaggttcctcgtttctctctgttacaagcccagtttcttcagttttcctgtcattctagcaggacaatacatctctccacactcatcaccccccgcatctccatattttagccaccataggattctgttgcctgctaccaaaaaatcttaataatacattaaatctcttactttaccctggaaatgacttctccttgaatttccttcatgctgcaattctgctctttaccttgagtgtctcatgtcctgattcggaaagctttttgctcctgcctgtgggtgacacccaagagttatagcctactcattctagtcaatccattaatagctggaattcaggcttaaaacaactcacattggtaagaaacatggcttctaagacaatttttgtttctcatgaataaatttcactttgtctagaggagcccaggaaatttcctgtttagccaattaaagcccattttgtttgtttgtttttaagtaggtgaagatatttagagatctaataggccctgtagaaataatttattatgtttttttgtcgtggttattgttatatgataaatgaagaatcaaagggacctcctggtgataaaaatgccagatttggaatcagaaaaccagaattacagctgtaaccttttttaaaaaatgtattttctgcttatgtatatagctatacctttttttttttttttgaaatggagcctggctctgttgcccaggctggactgcagtggtacaatcttggctcactgcaagctccgcctcccgggttcatgccgttctcctgcctcagcctcccgagtagctgggactacgggctcctgccaccacgcccagctatttttttttgtatttttagtagaggcagggtttcattgtgtgttagccaggatggtcttgatctcctgacctcatgatctgcccgcctcagcctcccaagtatatagctataactttttaactcacctaaaggtatgtccttgagcaaggactagatgatctcatcaggcccttccaattctagagttatgtaatttaaagttcagcaaagcttcaccaactatcacttcctactctatccctccctagacaagaattgacgcctacctttcctgagcagtgctgttggcaggtaatagcacaggctctggatgcaagtagacaagtgcccaaacctgggctaagtgacctcacctcatctgaaaaatgggaatgatgatattaaggtattgttttgtggattaatgaggtaatgtgcataacacatttagcacaaagcctgtaatagaacaaatgcttggtgaaagcaagccacaatgctattatagctatagctgaacacacttttcacagattatagtcatcccgccactaaatacattttgcagacagcttgctatttcttcttctgtaattctaaatgtgttttacctacaactcagtaggagttaggctaaatttatcgctttgcatggaatcagcaaaaactgtaatagggtatactgtcagtgagtaatggcatatatttgtaaaggatcagtgtttcctgcaaaggagaggaaggattcagcaccccatctagaagagctcctttgctgctgaaattgaatctgtatgctgctcttcagtgtattactttactgtgaggtgactcaggagataagacaacagagcattgtgggcaaatagatcacattcagaagaagctgcctcttagcacttgtttttcttgtgccctgctatatcccttttatggcctgaattgtgtttacccaaaactcatatgttaaaggtctttaggatgattccctaatccaatatgatgtccctgggagaagaagaaatctggacacagacgtacatgagcagagggaaggccatgtaaaaacacagaaaaaaagatggtcatcagaagccaaggagagaggcctcagaataaaccaaccctgctgacacctggattttggacttccactctctagagctgtgagaaaataaatttctgttgtttaagccacccagtctgtgctgttttttatggcagcttgggcaaactaatacaatctccaaggcctaaaaaagtgtctggcacacagtaggtattcaataaatacttgttggatgactacaagaagaaatggagcagttggcagctgacacccagttttaatgaaagcaagtctcagttcacacagtacaaaataagtcatttactgacaggtggctgaaaacagtcacacaagcatgtctggaaactcagaggactctgagttctctgtcctttttgaaactcagaagatgctttggacaaaaggtcagtggggcaaaggcaaaaatatgccagcagcagaatttgcctaacatccattggactgaggactagggccatttaggaatcaagaattaaaaaaaaaaaaaaaaaaaaaagaagcagctgctgcttctcacctctgaagcagaagatgcaaattatatagctatgtcactgagtcctggctaacagagaaacctctcaacctgtttagaagaatccacggccattagtggaaatattagtacatcagagaggttaactttgatgatccccaagcagcacttgtaaaattccatagtttacaaacttctccattccttttcatttttctctgaggttattgtggtaaagcaatctgcttaaggtctcaaattagtcagtggctgtatcaattaagctgatttcagagacaagtaacaattcaacagctgtaaacaattaggaaatttactgattcacataactgcaagtccaggagtggtatgtaattcaagattttttaatctagaagctccatagtgtgctccagagttcagattccctctgacattcacagttttagtattgccctaaaaacagctcccttaatggtcatagaatggaggctttttctttcacactcagtagatgagatggtttggctgcatcctcacccaaatctcatcttgaattgtagctcccataattcccatgtgttgtgggagggacccagtgggaaataattgaatcatgggggtgggtctttcacatgctgttctcatgatagtgagtaagtctcatgagatctgacggttttataaaggggagttcccctgcacaggctctcttgcctgctgccatgtaagacgtgacttttcttctccttcaccctccaccatgatcgtgaggcctctctccagccatgtgaaactgtgagtccattaaacctctttcctttataaattacccagtctcgggtatgtctttattagcagtgtgagaatagactaatacagtagacaaagagaatcacttaaagaagttgtacctgaagggtgagcaagaactttctcagaatccctcagtcagatcccttcttatttgtcagtggtccaatttggattcacatgtccatcaaggaaccaatcattgccaaagcagggagaagattgtcttaagtcaatcaggcacactcctgaacaacaaaaaaaatatggctcccttaaggaggaaggcaaaacatatgtgagataggaaatcagcattgtctaccatggtggttcaactgaaacatgagccaggtccttcctgtctaccatgtcatttcttatctgaaaaatctttacaacttacaagtaattgacaaaatggttaatcacgttgttaaatagctgttttcctcgcaaaaggacagtaagttttctttaaatagtgaagttcttactagtaattaaaagaggctacaatattgaaggttctgattttcctatgatttcgataataagttactaacattaagccatgtcctcctgtgtgaaaatcatcccctccctcgttccaactttcaggacattaaatgtaactgggactactccaggaacactaaaagccactgctttattacaaacggtattttgctgctcattaaagtaggtacatcacacttaatgaaagctcagtaagttataagcaagcattctcaagagtaagtcatcatgactgccaacctggtgctttcagctgtggagcatcccctagggactaggtggagaagtgccggggaagctggagctcctacctacagatgtcttggcactggaggctgctttctttgagcctagccttccaggcaattgatcctgatcctttggctcagagaatcattatcgtttttagctttgcagcaggagaccaatagagacaaatgaagaaattagaaccatactcaggcttcaccaaatcttatggcagagcccagaaaagcccactgggattgctccatagagacaccacagcacttaagcactgacagtatcaggttagactagaaagcgtgggcttccacagggcagaggaaaatggcccaggaagaaggggtgaagcctccctcaaagacaaagcgtgctataagggatcccaaatccaatcaagaacctaaatcccaactccatcctcaatgcagtttctccccctcaattcttttattttgttaatgtcttcatcatctgtcagatactcaagcttgaagcttcacggttacatgtgacttcttctcccttatcccccatttctgatcagctgtcaagagctgtcagttctatctcctttactccttttctttctgcctcttcctctccattctatttgctgtcagcctaattcagaccctcattaactcttgttggattattaacatggcttcatcactggcctattcatctcctgcccctatgctgtccaaccactctattaattgctgaattgattttctttttttttttttttgagatggagtctcgctctgtcgcccaggctggagtgcagtggtgctaactcggctcactgcaagctcgcctcccgggttcatgccattctcctgcctcagcctcccgagtagctgggactacaggcgctcgccaccatgccccactaattttttgtatttttagtagaaacggggtttcactgttttagcctggatggtctcgatctcctgaccttgtgatctgcctgcctcggcctcccaaagtgcagggattacaaggcatgagccactgcgcccggcccgctgaattgattttcataaagcacagctccaattctgtcacttccctgcttactgaaaaactttaaaagtccactttccctacaaaaacacatcacaatccctgtcttagatttaagaacttttgtgttctgatttccccagccttatcttctaactctcccctgaatattctcattctcacaagacttctcaaaattccccatatataccccacgtttccctctctgattcctatccaagagttactctgtacctggaatccctcaaatctccatttccacctaccatttatcctcttagatccagctgttatgttatggccttggaggacatattcaccagttgtgatctatccatcttctgaaaatccagtaagtattacctttctgctgttgcacaaacatctctatttttcaattataaaccatagctttcccactgtattcaactcattttatccattaattatacaaatatttattgagtggggtattattactgctacaggcactagagacatcataatggatgtacaaaacagaccaaaacccccactatcttagagcttacattttattagaggagaaaacaataagattaagaagaaaaatctgtaatatattaggtagtggtgagtacaatagagaaaagaaaaatctgagaaagggaaaggaagtgttagctcaaggggtttgacattttagatgcagtggtcaggaaagcactcattgaaaagatgacttgaagtgaaattctgaaagaagtgagagagccaaccatgcagatatcttgaggtaagagtactcaaggcaagggaaacagaaaatgtgaaggctttggagcagaagcttgcctggtgtgctcaaagaacaggaatgggacctgcatggaatgaacataacagagtgtccctggatgtaaagattgtaattaaagacaatgatggacatagagtagaatatccccaaaagcagacataaaatagtatctattgaaatattgaacattttaaatatatttctgtgcttttatgttgatatggtttgggtttatgtccctgcccatatcccatttcaaattgtaatccccaatgttggacaagaggactggtgggaggtgattggatcatggaggacaaatttcccccttgctgttcttgtgatagtgggtgcgttctcataagatctggttgtttaaaagtgtgtagcacctcccccttctctctcttccttctgctccagacatataggacatgcctgcttcccttgcaccttctgccatgattgtgagtttcctgaggcctcctcagccatgcttcctgtgcacactgaggaaccacaagccaattaaacctcttttctttataaattatgcaatctcaggtagttctttatatcagtgcaagaatgaactaacacagaaaagtggtaccaagagtagggtacctgaaaatgtggaagaaactttggaactgggtaatgggcagaggttggaagagtgtggagggctcagaagaagacaggaggatgagggaaggtttggaacttcctggagacttgttaaattgttgtggccaaaatgctgatagcgatatggacaatgaagtccaggctgatgaggtctcagatggaggtgaggaactcattgagaactagagcaaaggtcacttttgttaagcattagcaaagagatttcagccgttatgcccatgccctagagatctgtggaattttgaacttgagagagatgacttagggtatctggtgggagaaatttctaagcagcaaagtgttcaagacatggcctggctgcttctaacagtgtatgcttatatgtgtgagaaaagagatgatctaaaactggacttatatttaaatggaaagtagaacatgaaagtttggaaaatttgcagcccagccatatggtagaatattaaaaacccattttctggcgaggaattcaagctggctgcagaaatttgcacaagcaaagaggagccaaatgttaatagccaagataatggggaaaattccttgaaaattacaaagaccttcactgcaggccctcccatcacaggcctggaggcctagtagggaagaatggttctgtgggccaggccctgctgccctgctgccctgcacaacctagggacactgatccctgcaacccagccactccagctccagccatagataaaagggcctaagatacaccttaggccattgctccagatggtgctagttgtaagccttggtggcttccacatggtgtttagcctgcaggtgcacagagggcaagagttcaggtttgggagcctctgcctagatttcagaggaatgtatggaaatgcctggatgtccaggcagaagtctgctgcaggggtggagtcctcatgaagaccctctattatggcagtgcagaggggaaatgtggggttggagcccccacatggtgtccccactggggcactgcctagtagagctttgagaagagggccaccatcctccagaccccagagtggtatatccactgacagctttgcaccatggaaaagttttaggcactcaatgccagcccttgaggtcagccatgggagctgagccctgcaaagccacaatggtggagctgcacaagacattggtaggccaccccttgcaacagtgtggcctggatgtgagatatggagtcaaaggagattattttggaattttaagatttaatggctgccctgctgggtttcaaacttgtgtggggcctgtagcccttttgttttggctgatttctccctttcagaatggcagtatttagccagtgcctatactctcattgtatcttgaaagtaattaacttgtttttttttttttattttacaggctcattggcagaagggacttgccttatctgagattagactttggattatggacttttgagttaatgctgaaattagttaaaggacatgagatctggaaggatacagggcagaatgatatgatttggatttgtgtccctccccaatctcatgtcaaattctaattcccagtgttagacaaggggccttgtgggaggtgattggatcataggggtagacctcccatttgcagttctcaggatagtgagtgagttctcatgagatctagttgtttaaaagtgcgtagcacctcccccttctttctcttcctcctgctccagaaacgtaggatgttcctgcttccccttcaacttctgccatgattgtaagtttcctgaagcctcgccagccatgcttcctgtacaacttgaggaactgttagccaattaaacctctgttctttagaaattagccagtctcaggtagttctttctaacaatgcaagaatggactaatacacatggttacaaacagagtcattttttttctacttaagaattctcattccttcttttcatgcaggcttactagaaattgactttcacagtgtttgtttgaaaatgtctttatttcatcttcacttgtgaaagataatttttcagggtaaagcattctatgttggcatcattttgctttcagaaatgtaaatattctttccattgttttttgtcttctatgtttcctgttttcctgttcagaaatcaactatctaattagagcaaagtttatagtttgatccttttgggcttggttgtttttcaaattttcttttccttggttttcagcaggcttattttgaagcatctcaatgtgcttttcttgcatttgttttgcttggaattcatatggatttgtgtatgtatggtttgatatcattaatcaatttggggaaattctcaatgattttctattcatatattgtttgtccattttttttcttttaaaactataaatctacatatgtttggtacttttattgcctcataaattgtttatgcccactctttctttctttctctttctttccttctttctctttctttcttgccttctttttcttttctctttctctttcttttctttttctttctctctctctcttccttccttcatctttgctttcttccttccttctttctttcctttcctcttttctccttctttcctttctatcttttttgtttatttctctctatgcttaatctggacttttctactttagattttccagtttagtaataacctcttcagctatgttcaatctgttacagtttccatttaattctttgttttttaaatagatctcagatttggtgaaagttcccatattgtcatctatttcctttaacatattaatcacagttactttaaagcttatgtctgactaactccaattttgtatcacctgtagttttgttcctatgatttatttttctctttgtcttatttttgatagaaattatactttttgattgaatgctggatattatatatgaaaaactataagcacttccattcatgttattttcctccagagaagattcactcaatcatatatggcagatagcgaaaataggacatgtctccattaactattgctgcgtaacaacattacccagagttaattgcattaaaaaaaaatcataatcccagcactttgggaggccgaggcaggaggatcacttgaacccaggagttcaagaccagcctgggcaatgtagtgaaaccccatctctacaaaacatgcaaatattagctgggagtggtggcgtatgcctgtagttccagctacttcgggggctgaagtgagaggatcacttgagtccaggctgtcaaggctgcagtgagccaagattgtgccactgcactccagcctgggcaacaagagtgaaactctgtctcaaaaacaaaacaaaactaagcacttatcaagcttgtgattctgtgggttaggaattcaggcaggatccagcagggatacctcagctctgctccatgttgtctatagtcacagctggggtgattcaaatggctgaagacaattgggacaacttaaataaagccctatgtatggagcctctgtttttgtccacatggtgtctcctgtggagctagctcctttactcacatatttattccctgggctgggatggctggaacagatgagagttggctagactcactttcaacacattgtggtcttaaggtagtatgacttcttcatgacaagtggcttcccacagagtgggcatgtcagtagagaactttccaaaaggcctaagtgaaagcagcaacgcttcttatagtcttagtctcagaaatcacacaaggtcactttcagggcatatttatacatatggcagattcggggaatgaacatcaaaagaggaaaaaacatagtgaagtagatcatgtcattctaattaacaaattcaaggtggcatttcagactttgaaagtttaggcaatttctgtttgcctccagtcctagagttagcccttcaggggtcacgactgagtccaaggtacttagaacttttcttcctttgtggctgttagattaccatttgtgtctccttactactggaaagctgatgaaactccttttgacttttatcctatgacttttactcaaaatctaggacattttcccttctctccaaaatcttcttcccagaatcttgatttctcaagtcatgtctgcttttgttgtcacaaatctaatttttatctcttcagcatcatgagattcccaagggctctgctggattctctgtctcttgtgtcatttctctgttcagcttctcagccactcatctaacaaagcttatcaataggcaaataccccatggataaattaggggacagaacattgtgcttgcctcattaagttcccttttcctctcaatacgtgcctcaagttctgcataccttgaaagcttccccacttatacaaacatattttttgtgcctttctaattgttcttgacagtaggtttggtctactacaagtgacaccaccatcatcagaagtagaagtccatagccttttatttgaatgattttcactggctcaccactcacaatagctcatgtactgtttctgattatcatattctctaactttgtgacgtattttcaccatatggaatcttcttgtttttttttacccagctttcatggggatgatgatatccctgatcccccaggaccataatgtcccttgtccttgatgcagacactgtctatatttcttttagattcccccaaataaatacccactcagaagatatctagtcacaagcctttggttaaactagagctagaccttttttttttttttttttttttttctgagacagagtcttgctctgtcgcccaggctggagtgcagtagctcaatctcagctcactgcaaactccatctcccggactgttcaagcaattccctgcctcagcctccccagtagcttggcaccacgcccagctaatttttgtatttttagtacagactaggattccccatcttggccaggatgatcttgaacttctgacctcgcaatccacccgcctgggattacaggcgtgagccactgctgggattacacgcatgagccactgcgcccggccaagctagactttaatagcttaccctagtctatacagcagaaccagggtataagccacatcatgtctttcacatcccacttatggtagaataatatactgaaacatgttccagacctatttacaaagctgttgtgtgttctcatactctgattcataatgtattacatgactttaaggttgctgctttgcatacccattaccaaaatagaaaaaatctaacttaataataataaatcggtttttaaaaaataccatctatactcattccttcttccctccagagtacagtaatttttacagcaggctgctaaatatatcaagggataaaccaccactcatctggtggtataaagaagaaagtgaatattaaaaacaaaaatggcaaaaagggcctcagcttcctgcttcacctgttagttttctttcctgagcactgagcttgccaagattgatgtcagatgcagcctcaaactcccctgcattaacagaaagcattaggttctcaggtgagaaagtttttctttagtgacaactcttgcagacaaatccagttaatatgcctgtgtgtgcatgtgcacatgcacacatattcatgtatactaacagcttgatagatgagaaatggctttctgatgatttttaaatcaatttttatagtttaagggctttttttccagaagaggagaaaactttatttaggtagtcaagtgtttgaacttgctgacaggcacttcgcaaataatttttgagtgaataaatgaatgtgaataattgaatgactagtggactcttgcattccttcttcaataaaaaccaaaagcaaagcaaagcaaaacacaacaaacaaacacagaaatccagttctcctaagactagcacaaaaggagatctgctacttggggagcatgataaggtagactatccattttaactttctgctctagatttctcacagcacaggaaaaacaagggcctgtatgttaaaaagttattttactaaagttgggggataacaaaaagaaaaacaaaagaagcatgagatcatctattctgtttggcaagacacaatgttctctgtgttcaaaaattgagttcttaagaatcacaataaaatgatacaggagctgacagataaaatagcctgtataaaaaagaacctaacaaaactgacagaactgaaaaacacactacaagaatttcacaatgcaatcacaggtattaacagtagaacagaccaagctgaagaaagaatcttggaacttgaagactgactctaaaataagggagtcagaaaaaaataaagaaaaaagaatggaaaggaatgaacaaaacttcaagaaatatgggattatataaaaatgtcaaatcaacaaatcactggaatccctgaaaggaacagggaaaaaccaaacaacctggaaaatatatttcagtatatcatctgtgaaaacttccccaacctcactggagtggccaacagtcaaattcaggaaatccagagaacccctgcaacattctatacaagaagatcatccccaagacacaaattcatcagattttccaaggtcaaaatgaaagaaaggatgttaaaggtaaccagagagaatgcacagtggtcacctacaaacagaatcccatcaggctaagagcagacctctcagcagggaccctacaagccagaagagatgggggatctatattcaacattcaagaaaaaaaaatctttaaccaagaatttcatatctagccaaactaagcttccttagcaaaggtggaataagattcttttcagataagcaaatgctgggggagttcattaaccccacacccaccttacaagagatcttgaaaggagcactaaatatggaaaggaaagatcattaacagccaatacaaaaacacatttaagtatacagagcagtgatactataaagcaaccacacagtaataaccagctaacaacacaatgacagtataaaattctcacatatcaatgctaactttgcaaatatgttaaatgccccattaaaaagacataaagtggcaagctggataaagaagcaagattgaatggtatgctgtcttcaagagatccatcttacaagcaatgacagccataggctcaaaataaatggatgaaggaaaatctaccaagcaaatggaaatcagaaaaagcaagggttgcaatcttaatttcagacaaaacagactttaaaccaacaaaggtcaaaaaagacaaggccattacataatggaaaaggttcaattcaatgaaaagaactaactatcctaaacatatatgcaaccaccaaggagcacacagattcataaagcaagttcttaaagacctacaaagagacttagactcccacacaataatagtgagagaattcaaccctccactgacagtattagacaatgttaagcagatcatcaaggcagaaaattaataaagatattctggacctgacatcaacattggatcaaatgtatctgatagatgtctaccaaactctccatgccaaaacaacaaaatatacattcttctcatcaccacatggcacataccctaaaactgaccacacaatcaaacataaaacaatcctcagcaaatgcaaaagaattgaaattatactaagcacactctcagactacagcacaatgaaaatagaagttaagtcttaaaaaaatcactcagaaccatgcaattacatggaaattaaacaacctgctccagaataacttttgggtcgataatgaaattaaggcagaaatcaagaagttctttgaaactaccgagaataaagatacaacataccaaaatctccagaacacagttaaggcagtgttaagagggaaatgtatagcactaaatggctccatcaaaaagttagaaaaagctcaaattaatgacctaatatcacgactaaaagaactagagaagcaagatcaaaccaactccaaagctagcagagcacaagaaaccaccaaaatccacgctgaactgaaggagattgagacacaaaaaaccattcaaaagatcaatgaatccaggatttaattttttgcaaaaaaaaaaaaaaaaaaaagataggccactagctacactaataaagaagaaaagagggaagatccaagtaaactcagttagaaaaggccaagagcatgttaccactgaccccacagaaatacaaacaaccatcagagacaactacaaacacctctatacacacaaactattaatagaaaacctagaagagatagataaattcctggacacgtacaccctcccaaaactgaatcagggaggaattggttccctgaacaggccaataatgagctctgaaattgaatcaataatgaatatcttaccaatcaaaaagagcccagagtcagaaggattcacagctgaattctaccagatgtacaaagaaaagctgttatcattcctactgaaactcttccaaaagaattgaggaagaaggactcctcccctacccattctacgaggccagcatcatcctgataccaaaacctggcagagacacaacaaaaaaataaaacttcaggccaatacaatatccttgatgaacactgatgcaaaactcctcaagaaaatcttgtaaaccaaatccagcagcacctcaaaaagctaacccatcacaatcaagtaggttttattcctgggatgcaaggttggttcaacacacacatatcaataaatgtgattcatcacataaacagaacaaaagacaaaaaacacatgattatctcaatagatgcagaaaagtcttttgataacattcaacatccctttatgttaaaaactcaatagattgggtactaaaggaacatacctcaaaataataagagccatctatgacaaatccaggctgggcacagtggctcatgcctgtaatcccaacacttcgggaggtcaaggcaggcagatcacttgaagagtttgagatcggtatagccaacatggtgaaacccaatctatactgaaaatacaaaaattagccaggtgtgccctctccctctccctctccctctccaggtgtgccctctccctttccctctccctctccctctcccctttgcacggtctccctctgatgccaagccaaggctggactgcactgccgccatctcagctcactgcaacctccctgcctgattctcctgcctcagcctgcccagtgcctgggactgcaggcgcgcgccgccacgcctgactggtttttgtattttttggtgaagacagggtttcgccgtgttggccaggctggtctccagctcctgaccacgagtgatctgcctcgggctcccaaggtgctgggactgcagacggagtctcgctcactcagtgctcaatgttgcccaggctggagtgcagtggcgtgatctcggctcgctacaacctccacctcccagccgcctgccttggcctcccaaagtgccgagattgcagcctcttcccggccgtcatcctgtctaggaagtgatgagcgtctctgcccggctgcccatcgtctgggatgtggggagcgcctctgccccgctgccccatctgggatgtgaggagcgcctctgcccggccgcgaccccgtctgggaactgaggagtgcctctgcccggcggcgaccctgtctgggaactgaggagtgtctctgccccgccgccacccggtctgggaggtgaggagcgtctctgaccagccgccccgtctgagaagtgaggagcccctccgcccggcagccacccagtctgagaagtgaggagcccctctgccccgcagccgcccggcctgggaagtgaggagcgtctccgcccagcagccgccccgtccgggaggtgtacccaacagctcattgagaacgggccatgatgacgatggtggttttgtcgaatagaaaggggggaaatgtggggaaaagaaagagagatcggactgttactgtgtctgtgtggaaagaagtagacataggagactccattttgttctgtactaagaaaaattcttttgccttgggatgctgttaatctataaccttgcccccaaccctgtgctctctgaaacatgtgctgtgtccactaagggttaaatggattaagggcggtgcaagatgtgctttgttaaacagaggcttgaaggcaccatgctcgttaagagtcatcaccactccctaatctcaagtacccagggacacaaacactgcggaaggcggcagggccctctgcctaggaaaaccagagatctttgttcacatgtttatctgctgaccttccctccactatcgtcctatgaccctgccaaatccccctctccgagaaacacccaagaatgatcaataaatactaaaaaaaaaaaaaaaaaaaaaaaaaaatttgccaggtgtgatggtgcaaccctgtaatcccagctagtcgggaggctgaggtaggagaatcacttgaacccaggagctggaggttgtggtgagccatgcactccagcttgggcgacagagtgagactacatcaaaaaaaaaaaaaaattctgaaaacaaacccacagccaacatcatactgaatgggcaaaggatggaagcattccccttgaaaacaaaaacaagcacaagacaaggatgccctctctcaccactcctatttaacacagtattgaagtccaggccagaacaatcaggcaagataaagaaataaagagtatttaaataggatgaggggaagtaaaactatccctgttttcatacaacttgattctatatgtagaaaaccccatagcgtcagccgaaatgcctgttcagctaataaaaaactgcagagaagtttgaggatataaaatcattgtacagtggcagttcctcagggatctagaactagaaataccatttgacccagccatcccattactgggtatatacccaaaggattataaatcatgctgctataaagacacatgcacacgtatgtttattgtggcactattcacaatagcaaagacttggaaccaacccaaatgtccatcaatgatagactggattaagaaaatgtggcacatatacaccgtggaatactatgcagccataaaaaatggtgagttcatgtcctttgtagggacatggatgaagctggaaaccatcattctcagcaaactatcgcaaggacaaaaaaccaaacactgcatgttctcactcataggtgggaactgaacaatgagaacacatggacacaggaaggggaacatcacacaccgggacctgttgtggggtggggggaagggggagggataggatttggagatatacctaatgttaaatgacgagttaatgggtgcagcacaccaacatggcacatgtatacatatgtaactaacctgcacgttgtgcacatgtaccctaaaacttaaagtataataaaaaaatttaaaaaataaaatcactgtgcaaaaatcactagcatttgggtataccaacaacagccaatctcagagccaaatcaggaacgcaatcccattcacaattgccacaaaaagaataaaatacctaggaatgcaggtaactagggagatgaaagatttctataaggagaactacaaaacactgttccaagaaatcagagatgacacaaacaaatgggaaaacattccatgctcatggataggaagaatcaatagcattaaaatgaccatactgcccaaagcaatttacagattccatgctattcctatcaaactaccaatgacattctttacagaacttgaaggaactacttaaaaattcatatgaaaccaaaaaagagcccaaatagccaaggcaatcctaagcaaaaggaataccatgttaactggctttaaactatactacaggactacagtaaccaaaatcatggtagttgtacaaaaacagacacatagaccaatggaacagaatagagaacgcagaaataatgccacacacctataaccatctgatcttcagcaaagctgacaaagacaagcaatggggaaaggactctgtagtcagtaggtggtgctgggataacaagctagtcatgtatagaagattgaaactaaaactctactttccaccatatacaaaaatcaattcaagatggactaaagacttaaattttaaaatgcaaaactataaaaaccctagatgaaaacctaggaaatagcattctggacattagccctgaaaagacttcatgacgaagactccaaaagcactcacaacaaaagcaacaattgaaaaaaggggtctaattaaactaaagtgcttctgcagagcaaaataaactatcaatatagtaaacaacctacagaatgggagaaaatatttgcagattttatatcggacaaaggtctaatatctaccatctataaggaatttaacaaattttccagaaaaaaacaaacaactccattaaaaagtgggccaagggccgggggcggtggctcatgcctataatcccagcacttttgggaggctgaggtgggcggatcacctgaggtcaggagttcgagactagcctggccaacatggtgaaaccccatctctactaaaaatacaaaaattagccaggtgtggcggcaggcacctctaattccaactacttgggaggctgaggcaggagaatcacttgaacctggggggcggagtttgcaataagccaagatcacaccacttcactccagcctgagcgaaagagtgagattccaactgagaaaaaaaaaaaaaaaagtgggcgaagtacatgaacagacacttttcagaagaaaacatatgtatggccaacaagcatatgaaaaaaagctcaatatcactgatcattagagaagtgcaaatcaaaccacagtgagataccatctcacactaatcagaattgctattattaaaaagtcaaaaaataacagatgctggtgaggttgtggaaaaaagggaatgcttatacactgttagtgggagtttaaattagtttaaattagtgggagtttaaaaccattgtggaaagcagtgtggtgattccttaaagagataaaaacagaattaccatttgaaccagcaatcctattactggatatatacccaaaataatataaatcattttaccataaactcacaagcacgcatatgttcactgcattactattcataatagcaaagacatggaatcaactaaaagcttatcaatgacagattggataaagaaaatgtcgtacatatacaccatggaatattatactgccttaaaaaaagaatgagatcatatcttttgcaggaacatgaatacagcttaaggccattatccttagcaaagtaacacagaaacagaaaacaaaatactgcatgttctcacttataagtgggagctaaatgatgagaacacatggacccatagatgggaacacagaaactggggcctacttgagggtgaagggtgggaggagggagaggataagaaaaaataacaattgagtactagacttagcacctgcctgacgaaataatctgtacaacaaactcctgtggcatgagtttctctatattacaaacctgcacatagtaccccaaacctaaaataaaagttttaaaaattcagttctatcaacacataaccctctgaacaaagtacttccaactacctactctgtttccatgtcttagaggacatattcaaccatccctatctgaatgtgccttcccaagccttcgaaattcttccaagttattcaacaaacaatcattgagtactaactctggatcaggcactatctaatcactggcacacaaaaatgactaaaatactatccttgccctcacatatctcccaatcttgtgccagaaaggcacctaaacagaaacccccactataatgtggtatatgctgtgaaagaaatatgcacaggatgctacggtagaacaggtaaagggtatctgatctagtataccctgagatggctgtggggaaaaatagaacagaaattccggaggaagtattgactgaattcactcttaaagaatcagtgaaaaatcacctggggtaggtttgggaaaggaagagaatagaattctaggcagtagggacaacattagcaaatgcatgaagactaaaaacaataaaatatgtgctgataaccataagtagttcactattgctgaaaaagaaagtgacacttggaagaatagcaagaggcatcagggttgggattatgagacctagaaaaccatgtaaaggagtttgaactccatctcctaggcaatgcagaatcattgagtgcttataagtagcagagggatgtggttagacttgttatttagataaaccattccctatactttgttttctatatgtacatttgctatggtctgaatgtttgtgtctccccagatttcataggttgaaactaatccccaatgtgagaggattaagaggcagggtttaagggaggtgattaggttatgaggagtctgctctcattaatggcattagtgtcttcataaaagaagtttgaagaaggctttttgccacttccaccatatgaggacacatagaaggtgccatctatgaggaagcccccgaccccgcccaaacaccaaatctgctggagccttgatcttagactttccagcccccagaactgtgagcaataaatttctgttgtttataaattacccagtctaaggtactttgttggggcaatttgaatggactaatacagccttcctctaaaaaagtggcccatagctttcatcagattctaaaaggtatccatgacccaaaaggatcatggaccttggcatggagaataattctaaatatgaccatttatcagaagtatctgttcatatgttaaaatagtcagatgataggacataccccatgcctattgaatcagacttaggatgtgggcatagaaatctatatgttttttaaagctcctttagtggtgctgataggcatacaaattcaggagccattgatcaggaccaagagagctagatttcaactcttaactgccaaggattcatccacatagactctatctctttttgtttacttgcattatcaatgaccttttccctcgaatgaggtcttaacttcatgtgagaatgtgtccttacttttgaaaactacagtaggataatcattaaattgctggataaggcaaccccaattttcttgcaggagccatggcccacctttagtaatttagttgggtgattcccttagataatctgtgatccaggctaactcaaaaaggtaattggcttttgcatggttatttaaggagcggttttgtagcattcatgtaggatgcataaggtattcacctaaataacatgaagacagttgtttccataattaaagattaagtgatatattgcagagttgttgcctttaagcagtttgaggctttatttttatagaaactacaagatgatgggcgaggaaaaaagggggcctcaaaataaagtatttagacaatgttatgcaaaaaatagctaaaggaatttgttcctgccaatttctacaagctataaataaagagttagggagtgaaaaggaataaaccaacatgtaatgcttctgagatatgcttggcttaaagatacttttttcttcaaaaaggttggaaacagattggccatagatataatattcagtgaaaaatctgaatgttctctttcttacctaaggaagggggtggaatatcatacccatttgttgggaaaactaggtcagattatatccattcatagatgctctaagtcagagctagaccaagggtttgggatcatgaagaataacaaaacatattagtcacccgatacagataatttcccatatctgtcaaaaatgcaaaatgtctatcactcttagccctctcctcccctcccatcttcagaagcagttttgcctatcatgaccatcgtctctacgtggttaaattgtattattgataatgtcaacacactggttgatcctttgactcaaggtgacttggtttggaaatgggttcattttcccactgagaatcttcaggccaattaattcaaccttatttggaaactacaggtaattaattattttttgttaaccttgagcactcccacaagataggatagcaaaaaataaaagatttggtgggatttcacgtgctatatttagtggaaatgtcatataaactggaggatgaaatcttcctacaaaatcaaaatccaatatatggaaagactgctaagaaataggactgtcttacttagtaagagacaggccgtttctgctgtaactttctatgattttaagcatttaggaaggcattccttaccccagtattagtagaatctaaggagtccctggataacctttagggagtccatgaaactctttaatgatgtcatattatgaaatgtcaaatattgtgtgcatgtgcttatgtgtatccctgggccagaagtcataactttaactgaatcttaaagaagtgtgggacccaacaagcttgaaaaccaattgctctagcatttccacagtaatgcaaagcctactttcgtaagtcctgaatgtctccctatggtatagccaatctacttttaggaaaggtgctgtgttgtcttcttattggctaatatttgttttcaaaaatgcatttcgtttattgtctgtgaatttgcatattcataacacatcttaaattgaagtataacatagtaaagtgcataaagagaggttaagtatacaattccttgagttatgacagttatatgtacacttgtaaccacctcccaaatcaagatataaaagatttaaattaccctaggcacttctctcataatgctttagttatttctcacctccttcccaatgcagagacaaccactgttcttattattatcatcacaaattatttttgccaatttcaaaacttcataacagtattttcttaatggcatcttctaatgaacttttcactgaaagaaacttttcatcaaaattgtttatttttatttttattcctttatttcatatttttttttatgattactttttgtttgtcctaagaaatgttttcttactccaaggtcataaaaatagtctccaaccttttcttaaataccactgcttttgatatgttgatcttgtatagtaagaccttcatatattcacttatttctattagttttttgtggattctttggggtttctaaatacttctaagtagaattgaaatagctttacttcatccttttcaatctttatgactttaattttttattattggtattactgcactggctgggattccagtacaatgttgaatagaaatggtgagagtggactttgaactgtttctgatcttagagggaaagtactcaatgattcaccattgattataatgttaactgtagggttaacatgttgagaaagttaatcaggttgataaagtccccttctgtttctattttactgagactatttataataaacagtggttgaattttgttaatgctttttctgtattttttgaaatgatcttattatttttctctttgctaaaaatgtgagtaaccttgagttgactttctgtgtaaatcaaccttgtgtcccaggaaaaaactccaattgatcatgatgtgttatcctttttatacattgctgtattcaatatgctaatatatttattttttgtgtctatttcatgagggatatcagtatgtaattgttttttcttgttatatctttgttggttttattaatcaacattatgctaacttcatacaatatattggaacatgctccctccttttattttctggaagggttcatgtaacactgaaattatttcatttttaaacatttgatataattcattaaaaatccaattgttccttgatattttctaaagaaaaggtcattgttacaaattcaaaaccttaataaatataaggccatttatattttctgtttctttttgtgttggttttggtaaatttgtatttttcaaaaagtttttcactttaacttgttaaatttattggtattaatttttcataatgttctctttttggtctttaagagttaatttaatttaatgagtgtacattattttttaaaataaaaaagaaaaacttgaaaatgcaaattaacaaccacatccccatttgccccaatacgctgtagaccccaccacaaacacaatacagatgagtgaatcaacagtaacgtgctcagagctggggcatgtgactgttatgaccgagttccatattattgtctacacctaatgcaatggtgcaatagagatccatgtgatgtggcacttcaccatggaaggttttgcagattgctgaatcgagacaggcagtggaatataatagaaagcacactcggaaatagattggttgattcgtagatttactagtaattattatgtgaccagggacaatctcttaacttccttatgcctcgtggtgcagcaaaatatcacaaatcaccactaatgaacttactgatataaccaaacaccacttgttccccaaaaacctatggaaataaaaataaataaataaataaataaataaaccaaaatacctccatattgaccagataaggaaactgaggcataaggaagttaagaggttgtctctttttggtcttctaataccttctaatacctgtatagtgatgttctctcttttgttcctcatattggtcatttgtgtaattaaggtctgctagagatgaaatttctcaactattgtctgtctgaaaatattcttgccattcttttgaaggatttttttttattagactttaagttctagggtacatgtgcacaacgtgcaggtttgttacatatgtatacatgtgccatgttggtgtgctgcacccattaactcgtcatttagcattagatatatctcctaatgctatccctctcccctccccccaccccatgacaggtccccgtgtgtgatgttccctttcctgtgtccaagtgttctcattgttcaattcccacctatgagtgagaacatgtggtgtttggtttttttgtccctgagatagtttgctgagaatgatggtttccagcttcatccatgttcctacaaaggacatgaactcatcattttttatagctgcatagtattccatggtgtatatgtgccacattttcttaatccagtctatcattgatggacatttgggttggttccaagtctttgctattgtgaatagtgctgcaataaacatacatgtgtatatgtctttatagcagcatgatttataatcctttaggtatatacccagtaatgggatggctgggtcaaatggtatttctagttctagatccttgaggaattgccacattgtcttccacaatggttgaactagtttacagtcccaccaacagtgtaaaagtgttcctatttctccacatcctctccagcacctgttgtttcctgactttttaatgatcgccattctaagtggtgtgagatggtatctcattttggttttgatttgcatttctctgatggccagtgatgatgaacattttttcatgtgtctgttggctgcataaatgtcttcttttgagaagtgtctcttcatatcctttttgaaggatatttttagagggcactttttatctttgattctcaataacttgactattttgtgctcaggtatatttttcttcatatttatcctgtttggaattgattgagtttcttggatttgtgagttaatctaaagattacatccatttttgaaaagttctcagccattgtgtcttcaaatatttttttctcccctattcactctaacctcttttttggaggactctaattatttaaagttagactgttagatattatccttctcttgtggaagctctctttgtgttttaaatgattttttctttttacatttcagtttggataatttttattgatatgtctttaagttcactgatttttttttttttttttttttttttttgagacagagtcttgctctgttgcctgggctgtagtgcagtggcacgatccggttcactgcaagatccgcctcctgggttcacatcattctcctgcctcagcctcccaagtagctgggactacaagtgcccgccaccacgcccagttaattttttgtatttttagtagagacagggtttcactgtgttagccaggatggtcttgatctcctgacctcgtgattcgcccgcctcagcctcccgaagtgcttggattacagacaagttcactgattctttagtctgctacattcagtctgttgttaaacccatcaaacaaattatttctgatatttctatagaatttccatttagttcttttctatcttttcatgtttctgcttaaactcctcagcttttcaataatgttgtgcattgttctcactagattatttaacatatttataacaattatcttaaagttattttctgctaattccaacagttgggttgtatgtggatctcctctattaattttttcctctttatcataggtatatttttctgtttctttgtatgtcttgtaattttgtattatatactagaaattgtgtataaaaatgatagttatgactgcagtaatactgtgctcagaaaatatcatgcttcttcttctgttaggctgctggtgagagatctcaatctgatttgtagttgagcagggtctgggcttcattgcagctttagttagattctgttcaccactggcttcaaatatttgaggatggggttgagactttcccttcagtgggctttggatctcagcactaccaccaccagactctaaaggtctctatagcttacagttcagcttccagaattccaagtaccatgaaaatgctctgtgctttatagttcagctgccagttttttggggaacagagaaatttcctttgcttttcatctctacccctaggtctccttaccttgggagatctatttctccccaggctgttacacactgctcccagccttcagcaagacattgcattgcacttgatgacagcacctcagggcatctatctcagcaatcctgccccttccccagctttcattaagtcactactttgcatttgattaaggtcctgtgtaccttcaaaatagactctctcagccctcatgccttgctcccaggctttagggaattgctgacttatacttggtgaaggtcctgtgaacctcagggttatttttcttaacttccttgtccttgtccttagcctttgattggccagtgccatgtattcggcggaagttcaatatacctgggtggggacatcttttctgtgtgcttcagggaaatctttctcaactttcttgctcttcccctggtctttagtaggccaccgccttgcactgttatggtcctctgcatcttggaatggaggggatctttctcagtgttcttgccctgtcctcagtcattggtgggccactgcattttacccagtaaagatccagtgtgcctcaggcggatttctcttggacctcctatcctgcctctagcattgagtatcctgctacttccacttggggaatgccccatgggaaaaaattggcaggtgggtaaagatcaatatttgactggattaccttggaatttgaatttctcatgccaacccactgatggccactaaaaatttgttagcagtttacttgatttctccttaccccactctataacggagtaacaccctagagttactaggaatgaaagcagtcataggacacttttctcctaggaatgcattgtgtcttcctaagatttggtttatttaaatttctttgcatcttctgctctctgctaggctttaagttgaccgcaatattgcagcctattgaacttgtactcattgtactcattataaggatgagagtgcaactcctgtaactttctacatcgtaaccaaaaatttggaagtcaattatttcatgcccaaagtcttcagagccagatcttctctaacgactttgaaaataatatgctttctactatcctccacatgctttctctggcaagtgcaatagaatcagatatgacccacacttcagtgttttgcactgaaactttttcattagggggaaggaagatgagattcaagagaactattattattattacttaaattttttctgggagtacctgctgttagccaagcagtcatcctgagccctatcaaactgaacctactaaatctttgtgttatgacaatgtctttcacacagatttagaccctcacttttctatctgccacttacttctggtggaaggtgtccattaggtccctttgtaagaaaaaggtttacttcatacccttttcagctagttaaatccctactcattttttaagatgtcagttaaatgcatatcttccatgaagtcagccccagcatatcttacagccttgctacactgctagtgtaatcatcaccattttctattgtgtacataatgctaggggaaatatgagacctccttcttaaaactgcccacagggtggggcgtggtggctcatgtctgtaatcccagcactttgggaggccaaggcaggcagatcacctgaggtcaggagttcaagactagcctggacaacatggcaaaatgctgtctctactaaaaacacaaaaattagtcgggcgtggtggcgcatgcctataatccctgctcctcagaaggctgaagcaggagaatcacttgaacctgggaagcacaggttgccgtgagctgagatggcaccaccattgcactccagcctgggcaacaagagtgaaactctgtctcaaacaacaacaacaacaacaacaacaacaacaacaacaacaacaacaacaaagtgctcacagattatctagaattgggtttccgtgacctgacaggttattatctcccttggagtaaggatgaggggctagactagcatcttccaaatcataggtcctatgagggtaagagaggtgggtttccctaagagaaaacgggctgctcttggcaggaaagggcactagctgccaagggggtgatatttaaaatgctttaattaaaacttagttgatatgaatgttaccagaagaaaaagacaattgagaggaatgcttaatttgtacgtgtttcaacctaaaaacaagacacaagcgacatggtacccaggaaaaattttccaacatccaataagatggctaataccagtaaattggtctctgcaaggaaatgatagccaactttttttctttcttaaccactgaggaccccttggttaatttcacttccctggaccccaatttatttcaaacactttggctgccaaactgcaattatcaaaaaaatattaaaccacagactcttagcaattatagctcagcattattttcccttctttttaactgcgtggcaattaacctggtggccaaccaaaaataaatatactaatttccttatttaaattctacatagctttttattggagaagtttagattttctactagtagactttatttttattttttgagacagagtctcgctctgtcgcccaggctggagtgcagtggcacgatctcggctcactgcaagctccgcctcccaggttcacgccattctcctgcctcagcctcccgagtagctgggactacaggtgcccgccaccacgcccagctaattttttgtatttttagtagagacggggtttcaccgtgttagccaggatggtctggatctcctgacctcgtgatccgcccgcctccgcctcccaaagtgctgggattacaggtgtgagccaccgtgcccggctagactttataatatattgaaatatattgtgaatatgcagtgaagatctttaaaatagttacaacatttgacctgccaatttcatgtttattatttgtcctaaaacagtggtcagggatatgaacaaagatttatcttgaggaatatttaccactgcattcattacattaaactgttgtttaaatgtttaccatacaatagtaagaaattacaaaacacctaaatttccaagagtagaagttgagtgaaaacagtatgaaatataggaaatggccagacaatggagcactatgcagcattaacatttgattagataagatgatttaatgacatggaaatatgttctctatacattaagtttaaaaaaaatgttctaaaatgacatctttggggagcagccaaaatagcctccaagtctccttctttatagcttaacatttttttctgctctaagatgggatgctacgatcctgtctgattaaagacacattttaggcctgttttaccagcatatttggtcaaggaaaccaagttatttgcagtttagtttggaacagaaattcaaacttggcaaataatttgcatattgacagaagcatgttttctttctttataaaatgtatgtcaccaagaaagaaacaataattggcacctaaacttcatttcagtactgagctacctcaattacattccactaagtagaatgaaaaacaggccatccctcaaaggcagacaaaaaaaaaaaattgtgacttagcacaatttctgctgatggatttctgattcctgaatgttatgacgatttcatgttaagaggcattaaaacatgattataattgaaaacaagagggcctgtgacactagagggaccacggtttaatttggattagtattaaggtcctgaacattaaactaagaatatttcctcttcaacaggttaaaataaactattttggcaaaatattaactattactaatgggtaaaaactacatattgcttgtaccaggtgctattttaagaactttacatttattaactcatttaatcctcaggagaactctataaagtatagactactacttacctgaaaaaactgaggcacagagagatcaggtaatttcaatgaggtcacaaaactgtgaagacaaagagtcaagattcgatcccaggtggttgggctccaaagactgtaattttaacctgtaaacttggacagtttcatctgcatgaggccaaaagctaataaaaaccttgaatccactctagtaggtgagtacctccactgtatcctctaaagcatgtttcagcctagaggagtacccaacctagtctaatttctcccccaatattttgagttcctgcataccacagaggctgcacaaagtcaggggaggctaacgtaggatgacgcaggcatctacacataacttgtcattttctcatctcatgagtggactcagtggaaatgctcagaccataaatcaacaccatctgtaattgaggtttgctcaaggtatctttgcatgctatagcattcattgaaatatctgtgaggtaggttagaaccaaatttaacagttacttctccaactagccttctcatttgttctccaacttgggaatgattctatcattagacacaccctggggccagattttacaagtggcactatcataacagtgtgccagcttaggacctgagttcaccacattcctttctgagcctactctgatgatttgccttggactggccttgtccaagctcaccttgacatctgccttgttcagtgctcagtaggcagttgttgtttagaaagtctttgtaagtaactattttaaagtcaccattttacagatggacaaagtgaaatacagaacacaaaatgtgattgatgtcataaagcaaatcaatgctcccaaatgcaatttgccattcgctctcctgtaaatatgtgaaattggtgacttaatgttcttactgtaaaaatgcccaaagaaagagaatagaagaagagtaacagagttgggggagagctaccactggaatggaaggagcgagggaggaaaataggaaaggaggaaggagtattgcgagaacataaaaccttactacagtggccctgaatcatggagctgcaacacacctggagcacttataaattcttttgagaaatgccagtgtgacatacgcctcgcaagccagcaattcatgaactcgatgcagtagttgaaaccaaaggggtaatggccacagctgtcaggatccagatgctctggggctcggccctgccactttgtcccagcattcatgcgaaggaatgctgtgaactgggcatatcaccactgttcaccctggcctgcttccaacagcaccggctgcatctggcctggaagatggccatggctggcggccctatgttccccataaggttgggcactgggctgcagccaggctgcgagtgctggacctacatccagcacactctccgtccaacctcatctgcctgtctaccccagaacccccaaggaagcttggcctttcctggcacacagaatcctcctgagaactggcgtctttctgcagtcaacagaaaagatggaatgaaaaccacacagatgaaaagtcatgtcatttattaataatttcttttttttttcttctataaattggaaggaaaaagtctttggtgacactctctataaaacaatctatcttggatggcgaaacccagacataaagttacacaggtcagtgaagtaaatcaatatctatggctttgtattttctcacacgcgctctctcacacatacttgagggcttaattacgctaagtcattaatactctataacaaatgggaaaaacacttcagaaaagacctgtggtgacactacaaaaacattggcaacatattagaaaactctgtcccaagtgtacatcgtatacaaaataaggtatacttttgttttttgcgttacaatttgccacctaaaatagttccagtttttgatgtctttctttctgcccctcaacatatcctatacatattgttctctcaaaataagtacacaaggttcattacatggtaaccaggtcatttgcatagccctagttttagtaatagttacaaccgaaaggacagggatgtattcctgtaggagaagaacagaaaactattgcagaaatcaaatggcctgaggcctaaaaggcaaatcattacaaaaccagagtgactgaaaggctagcctgacttgattttaaacaagggtgagactgtgctatcctgagggctcagctttctcaaggtttgccttcttctcctagttgctgggccatgttaagttccaattctgggtagctcactgaggttcctgatataaaatgtattggaactctagaccagtgacaactacaatccctactaggtaaaactcatggagacaaaagcctttgatttttggaaagggcaaaaaggggagagatggttttgaggagtcaaatccatcatcacaattatggtgtaaataacagcttttttatccagaggttctgtacagcattattgaactgatgggagagaccactatcttagggtacttaatcccccaagcttttttttttttttaaagaaaaaaaaaaggggggccaggcgcagtggcttacacctgtaatctcagcactttgggaggcagaggcaggtggatcacctgaggtcaggagtttgagaccagcctggccaacatagcaaaaccctgtctctaataaatatacaaaaattagcccagtgtggtagcacatgcctgtaatcccaactactaagcagggtgaggcaggagaattgcttgaaccggggaggcggaggttgcagtgactgagctgagatcacaccaatgcattccagcctgggtgacagggcaagactctgtctcaaagaaaaaaaaaagacttggtgtcaaaggataaactaatctctttatgctgaagttcttataccaagtgagacaagtttagcacagtttgatattaatgcttatttgctgagaactcaactcaaaacaactttgtccctgtaagcatgcctgagaaaatgaggctgatagtgaaagaaatttcttggttaaatctggccaagaatgacaaaaccaactgaaaggttcttgtccatagtcgctgtaaaggggaactaggtaaatgaattcagcaactgcggtcctgatgtactggctgcatgttgattatattcacaagtaagaggcaggagcatttttatttgagagttcatggcaataactgctacttttaaatactggagatctcaagagacccaagggaacacaagacacttccaggtctgggaagtttgcttggcttttgcatccataattcagccttgtccagcaagaatctcattcagattccaacctagtaaggctgtcttccccctgatcctgccctttaaacaggtttgttcttaaatcaagtgccctgttttttttttttttaattaaaaaaaatagtatataggcctattcacattcattcatctcacccctgattaaagttcagtaacctttatgaaaggccaccagcataatactctttcaagtcaccaggtatttgagaaccaccaaaataaaggctaacatagcctactgtaatgaaaaccaaaagtcattctaaaagggaaattgaaggatgcaaccggattgatccttctttgagcaccatttgtcacaagaagaaattaaactgtaatgcacataagattccagtaacaagctttccctttttttttgaagcatctatctgaaagtgtgttgatacgaccaggtaggcccacctagctatgctatcttttgtggtatgactatcgtgattatttcatggatttttctctacagtctcaattttgagccattttgctagcttcaacaaaggtgatatgtattaatgtatttgtaagctttgatatttataacactttcatataaataaatacacagccagcttttaaaaaattacttttaagatcctgtgtcttaatgtggagctgggaaaagatgctgtgtggaaatccataagtggctgagtcctctttggaatttctgcaagcaattcattacgtggttggcactgtactctcagcccttggcttctctccaatgcagcacatgttagcccacttagggacccctagttatcattaaagttgaccaggagataattcctgacaccctacagagatggctatgatttgtcaacttgttgcaatgcaatacaactctttcctaactgaattaaaattacatattactgtcgagcttcactgatttgttaagcattgttctattcccagccttatattccaaatgggagaagaacacgctagctcacatcccaaagagatttgctcagagaatgacataaaatgaaactgtggagatttaaagtggatgaaaggtgtgttatatcctgttcttatttataattaccatttttcttcacataacacatgttgtttgtggaggatatgtgttgtgagcttggtgacaggtcaatctggcaaagcaggtccttgaatccacttgtgtgactgactggtacaattagggacattgctttgcaagccaatatgaccacctaagtttcaagttggttttggggtcattgaacaaaatatcgcatttattttttggtaaaggagaaacaagaataatttgccaatcctgaaaaaaataatttaaatacaaattcacaaaggccaaatgaataaagattaactgctaatcttttaacttgctgagaagtgcagcttaaatgacatgaaacctgtaagaccaaacattttatagaaaagacacaagtgcaagcaccatggacctaagaattatttttcaacaaatgcctaagagataatcacatctacttaggggaaaatgtcacatgtttgagaatggactatggatgggtccaattagatgagagaggtatttagggagctgttctgagtcatgaggctgaggagaaaatcctctctttaattgaatttcactgtctacgcacctctcaaaacaccatctggatatgtgggctctactccttgttctgcagctaggtagcctgttgagtcacttctctggacttccacaaacactttcactcctgtttacagcaccatccccgtgctatcattacaagctcctcttcctctcccagatgtctacaaagaaaggatgaggtaaagtccaatggacttacggtttccactgacctaagatggccacttgaaattatcagaacaaaattctctgatgaacttttcttctaaaacaaaactgaaaataaatggaaaagaaatatgaaatgtatgagagtttgagggagggactctaaagtgcttattgtttattcagcataatacatggtcaaactcaataatgtctttctcttccctgttttctctggcctcttccaagtagaagaaagcatttaatatcagaagtctccatttttcataacagagttagggatatgttttttttttcagtttatacttggagtttaacaataatcataagcccaagatagcattttcagggatagaaatgttctttttaacaagaagcacaactaaacttttccacagatttaaaaattaaaagtaaatgaaactatattcacatttgttgttgattattttgtttgccagattcttgctcaaaacaatgtttgaccaaaaatggcattagggtcccaatggcgagacatctcctcagttactttgcagcaatcctcttgttcattggtgtgaatttctaccttattacccctttttctttctcaaaagagaaactctgaaacttgagattctcacaaacattaaagagttcatcttgtaaataatctgttctccccaatatactcattattccttggcttctaaaccaaagcctcttcccagtgctacgcagacttaggtcaatggttgaatctataaccgtgcccccaacccctgcaagtattgggttactgttgtgggtctgtatttccatctcactaacatgctggtgggttatctggatagttctttgtgcaaactgaacatttcttaattatactagtgttttcttggtactaattccccccacccccccaatgaaaaacgattatcatatatatctatctcaaacatagagatttcagttagaactgcctacctggaagtcgtaatactttctttcatgcagcgacattttagagataaaagttcaagtggatttgaagattcgaagtggaaaacaatttgcactggcaaagttgaataatgaagttacaacttatgctcagttatttcttgataatgggtagagtgacttattgtgttttccacgaagtttgagcttttgaaactgcagggcaccctacatggccatgacaatgatgtctgtgggaaaaggaatagcagctttgaaatattcacaaccaacacaattttgattaaacaaagaactctggtttttaatagttttgatcattaaaaaagtttaaacctgcatagcaatcatttcaaaaataattatttaatgttccataattaaactgtacacaacctagtcttgggacacagaagccagtgaggtgagtttggagcagtctggtgcagtcccaggagccaggagttgagttctcattggcctttttttttttgtcattctgctcatctaagtttttggatagttggcacaatctggctctgctgatgagtggatctgcactgggaagagagagcagcttgacccccatcccttcttgcttcccctcccccactcagccggattcctcaaagtcgctcaatgtctcggtatttcttcctcaaaatagagacctggtctttaaagaggacggggtcgagcctcatctgagagtggatcagcggcatgtagccaaaccagctggcaaacgtattcatgcagctctgtcgctgggcaaagtggtcagggtcagcccaacgggaagcccgagaagtctagggagaaggagagaaacaaggataatgatgagagaagtgcaaggtgagatggaaacattgcagaaaatggagtcaggcaaatgagcaagcagcaaagcttggggtctggcccggccaccaagtctcaccatctatgcacctgctgaaaatgcaatcgctgatattggtttttcccaaggtatgctacgttcctcagtgttaaaaacacaaaaacaaagattcatgttgactttaattctctaaaatttattgactaattctctggtcagtccacgacttagcaactgaaactcgactactacagtgactcaatctaaaacctctctttgcacttgggaccaagtactaagattaaagatgtgtttctgctttcaaagagttttctaaatccttcctgtttatgtagttgatttagaaatacccaccaacttttagaagtctatctttctctctatccatcacttccttccttctactatctctttacctttataagggtcctactaaatcctttgttaaaaattcacatatatagttgaagaagaacaaaatagtgccttttacatgtcactcaaggctagtgttacgcagcatctaaaactccgttttctcttctgtagcctccccattgacgtgactccatgaggatgagaaggtgagattcagtggtatatagagcatgttgctgtatgactaactttatactaaaatctcaaaattctgttcttctcttaacccaagaattgttggctttcctgcttgactaaaacccccaaaggttactttttaaagggcaatcagccctccaaagaatcactgctcacccagaataaagattaactctcgacaaatagaaaagatggctaccatgtttttagctctctgtgttgcccctaaagttggttaaatatttttagatcatgcaaatgattggcattgatttaaaaagaatgccttaatgactggagtgctgaaatttaaatagaatgactaagcacattgtctttcaatccctgtttttatgaaacatggaaaagatgggctgcccaattatgggggaacccccacaagcccatttatgtcaataggcaagtctttaatgatgtatatgtatgcacgtgtgttctgtgtatttgttgtactcacagttttagaaaaatactttcatgggaagatacattttagtgtgagaagcagtaagagtcacttcagaatcatagtgtcaacatgctcgaaaataacattgaagataaacacaaatgtcaagttacctctgaacagcagaataacaaacaaaacactatttgtaaagtgttttcatggagttcatttgaatctcaccacaatctggtgaagtatctacccaggtaataacatccccattttatagctgaggaagcaagtttaagaaagttagagttatttgttcaaggctagagaggggcagaactcaagcttcattcttcagcctttatatgaggggaactctacttgataaatcagagaaagatatcaaatggagctgactggttgagttcatatcagagtagacaatcccaaatgtaacttgttttgaccctaaatggatatgagtttgtgggccatttttttttcttttttttaaaggcagagtctcactctgtcacgcaggctggagtgcggtggcatgatcttggctcactgcaacctccaccacatgggttcaagtgattcttgtgtctcagcctcccaagtatctgggattacaggtgcacaccaccatgcatggctaatttttgtatttttagtagagatggggttttgccattttgcccaggctggtcctgaactcctgagctcaagcaatccacctgctctggcctcccaaaatgctgggattataggcatgagccactgtgcccggcctgtgggccatttttgattggcccactcattcccaaagggtgctgtacccaggcaaaatactcatatatgcaactagaaatactgtctagagtttacactcattcctattcaaaaaattttttttaaagttcagttgaatcattcaggtatcgttttgcttctagatgttaacatttattctgagtcaaccaacatctattagaaaagatgcctttcttatgtaataaaagcctaatcctagaggatgatatctatttactttaccggtcatacaaacattcaataaattaatgtgtatgatggaaagaagggggcaaatatagtacctgaatacacctagttagacctaaggttaaatttagatttttttgttaaagatgtatgaattactagaaatactgtttggtagaattaggctaatctatgaaaatagcacaaatccaccccctaagaggccttgtatgactagaattccccacttagtgagtgttctgaagaactctgagtaaaaaaatatttttaaaatgtcatgtccttaaatgagataatatacagtcatgcaccacataatgacatttcaatcaatgttggatcacatagatgactattgtcccatatactgtaataccatatttttattgtaccttttctgtatttagaaatgtttagatacacaaatatttatcactgtgttacaactgcctacagtattcagtacagtgacatgctatatatgttatagcctaggagcaataggctatagtaggctgtaccatatagggctgtgtaagtacacttgataatgtttggataatgacaagatcaccaaatgatgcatttctcagaatgtatcctcattcttaagagataaataaaaaatataaataaaaatgtttgggcacataatagacaatacatcttgcttgaattcgaatattctctcagccttaaaaatttttacaaatcctcttatctgttctttctgtaattagaaggaaacagaattttctgccagactctttgctaaggacagctctttcatcataaccaatacctagaacagtgcctggtaacatgctcactaagtactaaataactttttataaactttaaattctttataaactttaaatttttgcttactaaatttagtgaatgaaaaactatcagcttaacatgaggcctagctaagatttcctttgcaaaagctagatttgtatatgttttccaatgcctgtgagaacaaggcacatgcaaagcccctcaaaattgaactaatataaccatgttaaagtatgttcattcagattaacctcaatcctgttggatgctccatgatttaacgtgagtgaatcttaatgctctttcttaaggttttttgtttcttttttctttttctttttttttgagacagagccttgttctgtcacccagcctgaagtgcagtggcatgatctcaacccactgcaacctctgccttccagtttcaagcaattctcgtgcctcagccacccgagtaagctgggattacaagcgtgcaccactatgaccagctaattttttgtatttttagtagagatggggtttcgacatgttggcaaggctggtctcaaactcctggcctcaagtgatctgcctgcctcggcctcccaaaatgctgggattatcagtatgagccactgtgcctggctaagatttttgatttcttacatatagtaggggctctgctcaagatgaataaagatagatgaaattcggcatatccaggtggacctgataccaagatggtggggtgtacaaggacaagcagtgaagtccacagaccctgggattcaattcccaattctgtctctaacttactgggcaacttgtggcaatatgcttaaattcactaggtcctagttttcttacttataaaaagaaaatgttggattctatttccttgaaaatacctttaatactaaaattgtataactcaacacaatattttacttcacttttataaaagctttcaaacatattatttcaaccctgtaaggtagatttcaccatttccatgttaaagatgagccaactgagtttcagaaggttactgacttgcctgtattttaaatcctgattctagaactgaaaattaaatattgtgattcctgttatgtcaccaagacacaattcaactcaactgcaagcaccagaaaactgtgttaaagagagtatggtttgctagacattaaataaggtacctacaatcaactttcataagttatttgtagggctttaattctgctgagggctgaatgtttgtgccccctaatatttatatgttgaagcttaattcttaatgtgatgatatttgcaggtgaggtctctgtgggatgattaggtcatgagggtggagtcctcacaaatgggagcagtgctcttataaaaaggaccctagagaactctcttgcccttctttctgccatgtgaagacacaatgagcagagggctatctatgaatcaggaaacagtctcttgtcaggcaccaaatctgctggtgccttgatctgggactctccagcctctagaactatgaaaaataaatgtctgttatttaagtcacccagtcaatggtatttttgtcatagcagcccaaatggactaagacaaactctaaagacatatctttctcatgtcaccttaaagattataggagagctttacatccttggcataaagatactcttaacttgtgtcttcctaattatccctgcaccaatcatacactcttttctagctttcagatgtagttcattcctggtttctcctcattatatgctcctgggtggaacagctagaggaacgtgagtcctcattacctggggctgaaccaccagtgagtgaagcaagggaagagggctcttctatacttacctgtcccatcattgtctccttatactgcttcttctgggtcactttgattggaggcaattttgtcacagcagacaccaggaagttcatgagaatgtcctcacaattggccaattggtccaccatgttcttcaggctggctggcaggtaatgggagtataggtagtgataatatctgtaaaaatcaaagatgggtttcacagggggccattatcacatgatgacaagtggacttctgagacagaaaacacatacccattctttgaatccctaaacatgtcatgaatggtaatgataatgatgatgatgatgacgataactatcacttctatggtacttgttatataccagatattgttctaaagtgttttacaagaaatgcttcatttagtcttcataaggagcctacaaggcaggttctattattactcccattttacagatgaggaaacaaggcacagagatacagacatacagacattgcttgtccagtctaactctaacatcagacaggtgagttagaaagaagaactaaataattagatggcaagataagttatttacacatgatctatatattataaagctgcttaacaattttaatcattggcttaatcagaactgtatttaatattatcccttgactctgagtccaacaatagactgttctatatttgtgccctataaaccatatatatttcaatcctgttagagcaaaatctgaattaatggggtggtcaatcgtaacagaaaacccataattaatttgaattatttctcatcctactgtttttaaaatgtatttatatacatatagcatatatttataggaaaaatcatttgagtgaatcaaattcttagagtggtggtggcagaagcaataggaacaatgaactttcaagaagtgaaatcttgagaccaagaatcagtcagcctaaatgtttatgccttgagcatttccaagctatccctgagatagcaaaattccctattctttactaaaaagactaaggcaagattggtgtgttcactaatgatagaagagcaggtattttgttactggttgagtggggaatgttagctatctaccctcactagtttggcaatcttactccagtcccctggctttaaagaccaaatatatgcaaacaactgccaaatttgtatctccacccctgagctttttccatatatccttttggatgtcttaacatgtccaagactgaacctatatattttccctcatacttgttccatctgtagttttcctcatctctgttgatcagccctctaatcttccagtgtttcaggtcaaaagacttggagtcatcaaactctacatccagactctctaggcatcatgctaaagcatcttcaaaataatctgatcactacttaccatggccaccattcacttcctggtcccaggatcccaccatctcttgcctagataatgtcaatcacttcctaatagggcttctgcttcaactctgggtctgttatagcctcttctcaacatagaatccacagtggatgcataaaagaaaagccggatttctcctccctgttcaaaccctgtcctcctcccctgtcacttagagaaaaagtcaagtcttcatgatggacatcaaggtcctgcaggatttatcactgtgttaaaactgcctacagtattcggtacagtgacatgctgtacatgtcacaccctgttcaaaccctgccctcctcccatatcacttagagaaaaagtcaagtcctcatgatggacatcaaggtcgtgcatccatgccccctgacttttctgacttcctgtcacccattccacccagtcacagtggtctcctcgatggttctccagtattctgcctcagggcatttattctcgctgttctcctgccacaacactcttggtgcacatgtcctcttgacttcctgtccttcaagtctctgctcaaatctcacctgtgcaatcagaatcaccctggacacccccaatctgccccatctccaccttcagcacccttgatccttttctacactttgtctgttatatcacttatctccttaataaactatggaattattatgtagacagtctttctttgttagaatataagacctgcattggcaaggaattttttctgctttactcagtgatgaatcccaagcacctagaacagtgcccttgggtgctgacttaggtatttacttttgttgttgttattctaaatattcagttacctaatatgccctgagagtattttcacacttcagaccaactgaaaatgttactctaccataatttctggaaatgaaacatgccaagaggtttcactggtttcaaaaacacacatttgacacatcagcaaaacttaagcggggatacagactaattttcctcaatgctgttaacaagatttggccttagttcctatttatgcagcagccaatataaaaagctatgtaaagtctgtaagagacatgtccagattcctcacttgtggtaaatagcagctcctgtcaacaccatggagtagtcgttcgtccactttgatgtgtatccccaccgctccttagagttatcccagaagtggctgcgcgcggggtaccccacaatcctctcagggaagctctgccacactgtgaaggcgaaatccacctgcaggcagaacacaagccaaacaagcaatcaacagtgttaacaaatgtcaacaaaacattaccttctccccactaattcataatgcaaaatccggggactgtggcgaaacattaattctatgtattcatcagcaaattaaactgactgcttgacattttgccccataattatgcacattttaatgttttctgttaaagaaacttcagagtagtatggaaatgaaaggaagaaaaaaatttgctgatatgccctttaaaaatccagtctgttcaagctaaaacataagttgaaaaagcttcttttcccccttcctcaaaggtgcacgtgccttgattcacgtgagacacaaacacatctgttttataaatgagaaatttcccatgtatatccaaagaatgaatatacaacatatatcatacccagcatatatcaaagccaaagtgcctaaaataaaagcaccctcttaagagtaagagaaataactttaaaaaaaaaacaccacaagttctaacaggaatacagagcaggtatcataaagaaaacataattcaggcttcttaggtttgaagatgcacagtttaagagacactagaagaaagcatcaacagtgaaaatcactaagaataagtggggacaagaacaactgaagccacagaattattttaaaggaaatgcagctaaatgtctctccggtgcttatagtagcccaaagcaggtgcttctgaacctgctataaaccagcacttatagttagcaagtgatctgttttcaaatgcataaactcacttctgatttctatgatcatttgatgaatggtaaatcaaaataataaacagaaaataaaaataacaaaaatagtgacagcaaacaatcatataatgctcataattgtgaaatgttataatacaacaggtgcagctataggtgcttatccattttaactcattccatcctcacaatacccctgtaaggcaggggcttttacattcttcagtttacagaaagggaaactaagatataagttcaagtaatttgctgagctaataagtggcagagccaagattcaaactcaggcagtctggtttcaaatgtgctacgtactttatcaaaacttctcttttggctctgttactccagtgttaaaagcaatttgtctcttatacacgctatgattcacctcgttatctttgccgtatctcttctggataagcaatacaaatggaaatttcatctgtttcgcaaatattttgagtcctggcactgtgatggtagctgggggacggagggatgctgctaggtccaggtcctgccctctcagaggttccaaagcaggacctgtgatggttaattgtatgtgtcaatgtgagtataccatgaagtgcccagattaaagatgatttctgggtgtgtctgtgagggtgtttctggatgagactaacattggaatccacgggttcagtaaagcagactgccctcgccagtgcagatgggcaatatccagtcagttcagggcctgaatacaaaacaaaggtgaaggaaggaggaattcctcccctttttctttttgcctgccggctgagctgggacatcgaacttctattgcccttggactgggatttacatcattggctccctggttctcaggctgtaggactctgtctagaattacaccagtagccttcctgggtctgtagcctgcagacggcagatcatgggatttctcagcccccaggattatgtgagccaattactcataataaatctctctctcagtgtatgtatgtatgtatgtatgtatgtgcatgtgtgtaggtatatatatgtgtgtgtgtgtataaatatatatatatatatatatatatattatgttctattgattctgtttgcctgaaaaatcctaatacactgccctatcttaagataaggaagacttaaaaatatggcttgttccccaaaactataacatccacacggggccaggcacagtgtctcacgcctataatcccagcactttgggaggctgaggtgggcggatcacttgaggtcaggagtttgagaccagcttggccaacacggtgaaaccctgtctctactaaaaatatagaaattggctgggcgtggtgttgcacgcctgtaattccagctactggggaggctgaggcacgagaattgcttgaacccaggaggcggaggttgcggtgagccgagatggtgccactgccccctatcgtgggcggcagagtgagactccgtcaaaaaaaaaaaaaaaatccagagcggggaaaaaacccgggtggtggaaccgacattaagaaagcttggtagggagcacgttatctcaaagttaaaaggtagcaggggatggtgagcatctgctagaaaattgaaattaggttgtgattacctacaccttttcactagtggtcaatactaatggagacaactgatgggacagtatattatgcagcctgttgtcaaaggatcagcctggccgtcagcactctttggggttttctatcattctttgaaaaggaaacacatgcactagcaactactacagaacccaatggggtgttctcatcgcatgaatttcttactatcttaaggctgtttcaagtcatttcaaaggaactcaaaagtaaattcagataaaactatgattcttgtgatagctctaatttcatgcagattattaacacatcaaagaaggcaaaggtcagtttaaggccctttctctcaaaaaccaacatctgttttcttttgagcagcgtctgcagcaatccagataaatgtaaataactataaaccaactataatgccctttataggatgctgtttaaaaatccatccttaatgctgcagagagacatttaaacaatctgagatccttagagaggaaaagaaaagtgaaccaacatctattcacctaaaaaaagagaaaagagaaatccttgcccaggaccattttaggcaacacaaccactccactgatcagcaggcaaaagcaaaccagactgccagcctcttagatttacatatcattttcaacccacgttgacttctaattacttcacatacaacacatgttcctcccagcatgcattgagtggttggaattgctattctttgaaaagaaattcaccagcatgaggatgcatcacagcagttgaaagttatttcaccataggatagggaaaaacaatcctagagtgagactaattgccttgtgcccagggaaagatagaggatgaatcaatacttcaggtcataggatgatgattaaggtacatgctgtagttgtcttgaccatttgttgcaccatggcggtgtgctgctttgcctgtgtttgccctccaaaatccactatccactcttcttgtcctgccctgtgccctcagataatggacccctatggactgcatcacctggttgggttaggtcaatgggagtcaccggcaggaaaatcgaggcaggatagagagagaggtcagtgtatctcttctctgctccctctctcctttgccattagagttctggcagtagccacgtccttccatgatcatagcacttgtagagcagcctctccatcctagtgccatctctcagggcctttgaaagaaggagttccttctctaactccttcaggccaaagggaggagctgcttcctgctgtcattactcaccaggtgcctcattctctcttatggggtcttttaaccccatctacacctccctaaggaatccaaagttccttcatttgaatcatctgatttgaattcagtttgttgccaggactcagatggatatagcctggaactgtgtaactgaagtacctggcatggagaccaggacaaagaaatctctcaataaatacttgttgaatgaatgtgttccagcttcccttgcagaaagtggcagaaaaatgcaagccagagtgacctgtaccctgtattccatagctgtctttccctatgaatgttaagcttatcaacatcccttcctcctgccaacctacacatgacacaattggcggtgtgtccacctttaatccccaaagcatgcatccccccaccctggcccaaccactcattcaacaagtatttatagagcttcggctgcatagaaagcattttaacaaggtgaggtccaggacattttgtcctgggattatttaggttgccctttgacataacatctatgcaactctatctgatggcaccttgaaagcatctatggaattttttttttttttttgagatggagtctcgctctgtcacccaggctggagtgcaatggtacgatgtccgctcactgtaacctctgcctcttaggttcaagcgattctcctgcctcagcttcccgagtagctgagaatacaggcacctggaccacgcctggctaatttttgtatttttagtagagataaggtttcaccatattggccaggctggtctcgaactcctgaccttgtggtctgcccgcctcagcctcccaaagtgctgggattacaggcgtgagccaccgcgtcaggccacatctgtggaatttcaaggagacactgagttcacctaggccaacattgagtcttggctctgtgggcagcaggccattagaactagattggtgtccaggaaaatgcaggttacactgatgtttacattaaaaggaaaatgattgtgaacaaaaaggaaaaaagacagggagagggaggggaaaggtgtaagtagttacgtctccatgctttttagtagttgccattaataatgtatttctcatatactccatttttatatagctgtctttggtcctctgcatggtttaaaggaaggtttcagagatcaatactcattcgagttgtaaaaattggttttctaccatatctatctttcctcctctctctctcctccacgcgcattctttaggcaatcttatttttggcacaactacctgaacatctgaaataggaatctccatcacaaccttgaagtgaaaccgtttgctcttgtataggtgaaagaaaatgagctctttaaaccaagacagaaaagctgcctttagagctccacatagagtctcctaactgaggcaataggatacgtggagaggaatgggattatctcctccggaaagcatggtttcaacctaatgcagaacacgcaccctcccccttcccctcagttctgcgcaactgctcacaactgtgctgtttaaaaacaaaaaaggagggcaggcctgggaggaggggtgaggcccagttatgcaaatgaggagccaattagcagagacaacaaaggggagatgcccgcctcagagtgccaggtggcagcaaggtgctaacaggaatcgggctgattaaaaccagcgctgtaggaagttttgaaaaatgttttcaacttctgccaaggcacggctaaaagaagcattagcatcgtgcaacatgaggtgactgcctgaacagcccacctgctgctcctcaggcatgggttcttacctctgttgttgaaagcaccgtgtcctcgtcaaggctgagcacggcgtctgtgatgatgttgtcgtagggcagaaaacggctgctcataacctgggaggaagtagaagtaggcagtggggagggaatgagggaaagaggtaacttcagagtcttgttttcaggacaattctcccatcctcacctgcataaagaatgcgctactatcatgtcacccctcaacaccgaaggaatctcatttcccatcaatgcagatgtatttgttcaacaattattgggcacctactgtgtagcagacatcttgcttgtcaaagagggtacaaagataaatcagacatgttccctgtctttgaagagttcatggtctgtagaggagaccaagaagcagatgaccagtctttgcttgatacaaaaaatgccaggagaccacaggatggagcaactagctgtctggaagagcaggtgaaggcctcatagaagtgacatttaagcaggaccctgatgggcagaaagaattcaccaggtatagatagtaatgaagtattaaagacaagacttggcagatgcagaggcactgagcagagaacctgcatcctgacacccactcttcccaaccgaaagagtgaatggatggagaagtgattccaagtgtggacacaaaccacggggagagcagatcactgtagaaagtgctgcttttacaaattacaaacatttacaaattaaaatatgtattagcacagattagaaaaaatatatacacatatattagcagctacagcaatcaaaggtaatattaaagttacaaataacttcattaaaatgagaagtatactgatttaaagaaatatattaggccaggcgtggtggctcatgactgtaatcccagcattttgggaggctgaggtgggtggatcacttgaggccaggagttcaagaccagcctgaccaacatggtgaaaccctgactctactaaaaatacaaaaattagccaggtgtggtggtgcatgcctgtggtcctagctacttgggaggctgaggcaggagaatcacttgaacccgggaggcagaggttacagtgagctgagatggtgccacagcactccagcctgggtgacagagtgagactctgtctcaaaaacaaaaaaagagaagaagaagaagaagaaagaagaaggaggagaaggaggagaaggaggaggaggagaagaaggagaaggagaaggagaaggagaagaagaagaaaaaatattaaataatagcacatatgatccatggatttagaaaaattgtgaaggtggtgtatgcataaagtttgggcagttctggaataaggaaaggtggactacgtgtgcacacacagtggtgtgtgtgtgtgtgtgtgtgtgtgtgtggtgggggctttggagattatggcatcagctggaaaaattgagggtggagaggttaccctgtgatagtcacaacttaaacctttgtgttgaatgtaccatagaggaactaaccataagaatgctgacaccataagaataacattttttgaacatttactgtgtgccaggatatgttgcaagtccttcatatatatcatcgtgtttcatctttataacaaccccattttacagggagggaaactgagatacacaggttaagtatcttgcccaaaacggacccaggattttcccccagatggtgtgactctatagagcaccttggccaccgggctgtatctgaatggaaaggacctcaaaagtgaatttaggaacacatatgccaatcatatgctcatcaccttcttccagaagttatagtaaggatgatgacatcctctctgaattcacacctgccatcaactttgaagagacaaaggccagggaaagaagcaacttaacactgcagacaaagggaaagaggaaaagggaggtacctagccagctgccagagctgcagtctccccaaatctgagtacccctaggagccagctcatctgcaggcctcatctcaaactcggtttctttgccggcgaagctaccagagcacctaggactttaatgcatggacagtggccactctaactcatctccaagagctcaagggacatagctgtagcacacatggcttcaggggttgctcctacacatctgtcaactgggtcaagttttttgttgttgttgttttctttctcaggcttttgaaataaaacacaaagtgatcagcaacctcatagacacagtgctcagaattctcagcctgaagcaatcctcctgatactgtttacatgtccactgactaacgcagaaaccattagctgccagcttagcactgccctgacctttcccttgttaagcccacaggggaaaactgcaaagacaacgcctataaattcaaaacagaatttttcagccaaagcagcaaatatattgcttctaaattcatggagatagagattttaaaatggagaatgaggaagatgtagggcttcttcctcatcatctgcccaaccacaggtcttaaaaggatctgtttcctttttttctgaacctgtttcatcaacagaagtaaaaagcccataagccatccattttcgaattctcatgcagaaatgagaggcttttttcaaacacattgcctcagcgaccttcttaaatggattagcatgagagaaaccaatgtatttacaaagttaaacctgagtgaactgggttttccttgttagttcatttaagaaaggtttagctaccatgtgaaagcccaactcctttaaaacgaacaaacatgttggccaggtacagtggctcccgcctgtaaccccagcactttgggaggcctaggcggtggatcacctgagtttgggagttcgagaccagcctgactaacatggagaaaccccctctctactaaaaacacaaaattagccaggcttggtggcgcatgcctgtagttccagctactgaggaggctgaggcaggagaatcgcttgaacccaggaggcggagattgcagtgagccgatatcatgccattgcactccagcctggacaggcaacaagagcgaaactctgcctcaaaaaaaaaaaaaaaattaacaaacatgcctaggaaatgaccaagactcaagaagtttactgtcttgtagtgtgtgtgtgtggggtggggagggaggtacataagaaatgtacacaaataattatataaaacacaataatagttaagatttattgagtatccacagtgcgcccacacttctcagtacatttatttatgtatctcatataatctgatctttttggctaccttattagttacatattatgactctttccatttattgaaagggggcatcgagacacagaggattagcaacttgctttaagtcacacaaaagtaattttgactttagagcccataatacaaatcataagattatgatgcctcccagaagaggagctaacatttattgaacccttggtgcatgtataatatgcataggactaagcacctgatatggaatggtcttatttaaccctcaaaatgggcccatgtcatagcccaggttttctagaatactgagcctgaagcaagacttaagtgcaaacgcttcactctgaggtgcaatcccagggcactgagagtcagggaaaagacataggaagaacccagcccactggattcagtgcccaaggtggaggcaaggactgaacaaatgccaggggcctgaatatagatgcagctgggaggatctgaggcatcttgtaagagacatctgataaagcccacgagaaaggtactattattatcaccaccattttataaagaaagaaacggggagtttcttttcactgagaatgaaaatataaaatcaatcagtgagtcagagcatgaaaatgctatactacctaaagaaatcagaatggctcccagacagactggattgtgtctgaatatcctgacatatccaaagaaagacattatccaccagaagcagagctggtctccttgacccatggaagcatacaaaacaaagaatcccaaagttcaacattaactgcctgcctctgagtactgttcatggcttcaggcattggaattggaacactgccattcctatgatgggctattctatgggggggatggatataagggcctgcatgaaactgtgcttatggtgagattgatttgtgagagaggcatgtgattattccaacatccaccttttctcattaaatgcttaccaagcagctctctaacaaacaggttgtttgactccagccttatgagagccatggctatatttgtcacattccccactgtgttccaagcctgttacaaggagctcagcacacagtaggcactcataaatggaactgaatagataatgcactgatcatcttgtccttgtgacagttacaattgcattatgtcaaaccatatgaaattgccacttttggtgagtcgatgatgatatcaaatggttcagcctaataaactgattttgtcattctggcgcaaaggtgtgagccactctcttatgacctgaccccttggggactgacaaggaaagttttttagatggcactgcttcaccaatctcaatttcatttagtagtgactatttccttcacaatgcgtaagatctataagtaacaagcagaagctagagaaaaaagagctagctgctctttagtagaagaaatttcaaggaggaggtagcatgcaaacgggggcttaaagaatatatgggaatgttgacaagcagagatgatgagttgaggggtggtcaagacttacaaatggcaaagtcaaaattagaggtaggaagagacacagcgcaattcagctaattataaatgatcaaatgtagtagggggcagggtctgtaggggaaagcaatgagagaaaagattggaaggctggctagggccaggttacacatggcctcaaatgttaattggaagcactagcaaatggagaaaaaggccgggagatgatcagaaagatagttcagctctaggcaaagtgaactggagaacagaagagaggccggctatgtagcactcatgagaatctttacaggcagatgccaaacaaaattaaggtgaaaatgtcctttttaaagtgaatgggagaaagaaacaccattctgatagacatagctcattcagattaatcagccaagcaaaccatcaccaccaccatcagctttatcttcatctttgtcatttacagaaagataactattgccagctcctgactttatttaatcctaacagcaaccctacaaggtatatattattgtttccactttgtagatgaggaaactgaggctcatagaggttaagtatacacacaaggtcacaaagctataaaagagttggtatcaagacccagatttccctgatttgaaagcctattgtggtcaaatctgagaatattctgagaaaagtacagttttagaaaaaataatccaggaacagggagaagatatctagggccaagacccaaagtgccccatggagaaaccaaggctccacagtggttccacatataggtccccttcgagtcttaccttgctctctccttcaatgacgacgacaggcacagcagtggcaggccagcggtgtttggctggtaggggcttgtcacaattccatagaactatgatctgaaagggatggggctcattagatggctggggtaggatgtatttatgtatgcctccaacccaaagcctcttctcagagacagaaagagaaagaggagctggaaatctcagcaagacaaaacggcagacatcaaaactgagttttaaagtgagtccattcccacacaacctcagaacattatcaccccaacaactggagagaggacagaaagagcaaacaaataaacaaacaaacaaacaaacaaaaccaactgtgtccgggaataggggaaagctgcaggaaaaagaattacggtggctggagcttaataaagtggtttcctaaattctgatatcttatgatggtgtgtgagataacaactctgatcaaattaaataaaaatgtatactgagcatctgaacatctgctctgaacttgcactacaccaggcaatgtgggagaaataaaaaaattcaagctagaactaagatgagctcatgttttgcatgctctagaatggttgctgattttatgtgactttataatttccaataaaggcatttagttcaaaaatgcatacttccttattgaattctttccttgtttgtaaaccttcttgtataaactaattcacaaatcagaaaaaccaccgttcaatatgggaggaacactgatttggaaaatattgttaccataggcataatcgtctgctcccaattttataattagtcatagttgctatgaaaagaaaagttgacacttcatgacaccaacaagtctgcttcttctattgaagcttagttgtctgggtcctcccagaggctttttggatgttactttatcattttgacatttaaaaacaaaatcatgtgcttgtatcttctttagagactatgttggtgtatgtatatatactttttaactctataccagtgctaaggtctctctgtaacccatcccttccctgtgcagatttcacttccaagaatttctaagtggatgaaaagggtgtaacgaggcaggatgaatgaaagggagtagcagggtatgatgttagagaagtcccggggagcctggggagcccgggggataacaggtaaggagggcggagtctctggtctggagctggagcaggcaggggcttctctgtcaacttcccgctcacctgggcacagtactgggacttggctgcagccacgagaagcttcaacactggctgggactgagagaccaggggggtcaccgcatggatgactgcagtgaatttggaggggggctttaaacctgaaataaaaaggagagtagagcctaatgaagcgctggaaagcaagacttagaaaattactcctccttgctccgctgcctcatgctggagcaaatgttccctcctggatgatttctcctttgcttcttatgtcctgacaggacagaaacaagatgaaaagctgctggttagctactgcctgagtctagagacctcaataaattccagatcaatgtccacttctaggttcttgctttgacatcctttgcccctcttggtgatgtttctgtgatgtccctttggctttttaggtacccagtgtccaaatacacacaacactcaccacccttcatgtgctgtctctcccatggtatttgcatgtgtctgatttttaattatgtaatgaaagggttctacctgactaatcgtatttcaaataactagctagtgggaaaaaaggtgaaaggaagagcatccagggcctgactgtctaggtctgaatcccagatctaccacttactggtcgggggaccttggaaagattacttaaccctctgtgtttccacagctgggaaacagacctgatagtaacagtgccaaatatggggttatcttgaaaattcagtaagtttgtctgggcacggtggctcacacgtgtgatcccagcaatttgggaggctgaggcgggcagatcacttgagaccagcagttcaagaccggcctggccaacatggtgaaattccgtcactactaaaaatacaaaaattagctgggcatggtggcatttgcctgtagtcccagttatcgggaggctgaagcaggagaattgcttgaactctgaagacagaggttgcagtgagccaagatggtgccgatggtgccactatactccagcctgggcaacatagcaagactccgtcttagaaaaaaaaaaaaaacttaatgcatacaaagcacttagaacaggacttaacaaatgacaagtactcaatatatgtcagcagctaccattatcatcaccctcaccaacattattattttggagaagaagcctccatattcccagaatctcttcttcgtgtagcagtgatatagctgagaaaaaaagtatgtgaggcagacttttgccagttgtgagctctgaagccctaggttaaaaaggatcatagatatgcaaaacaaccactgtcaccaaagagacagaagtgagatggcttccccccaaggagttttcccataagaactcactaagaaattagagacaggttaagagccttttaaaacttcattagtttagacccactaatttggcactttagtggcttaactgcgagcaacacagtgcagggacattcaagttacgctttgatactgatgggataaaggctagaatcagactatatgtgtattacaggattatacaaaggttttgtagagaaaattatatcatccagcagcactttaattgtatgttagaaagaagttaaccttcccaatatctagatacatattcaaagttttgccgagtaagaagaataagcgtgattgagggattgccttttaaacaggaacgacaagtcattgtctttaaattttcctgcaatagtttaagaagcatcatttatacacctctaatgtgctaactccaaaggaagatctaaatattgtacaagaaatatacagaaattcttgtcaaccagtgccttaatctgacaatttctaaattctgttacccaaatgtcaacaatatactgaattagagatggttcccataacaggtttggtttggattaaaaggtgctttgtcactggttgatgcttcaggccatgcatttctttaggtttcatctcatcagtttcaaactaaacatgtacaacttaaaagggtgagggtgttacggagaacaacggcactgaatggaaaatcttgtctttttgctgtatcagcttggaagatgctttcctgtcctaggctttctcaagtttagaactgtaactgatgggaaatgttcatgatgtttctaacatgagagcaactgggggtccaaatacataaatgtctaaggcaataacagtagccggtggtagagatttatccctccgccattcccttttccctactgtgattagactgaaaaccgcttgaaagcagagattgtatcttatttgactttttatttctagtacccagcaatacattagcatagcacatagaaggagcataataaaccttggaaaaatgaataaatttgtgcttgtcacacattcttagttatttctcctttcctcttattcagtttttctttggtaaggaatagagatattgggattgtgaaaaaaaaaattggggagagctctccattttatatatgatgaggcttaaaatgatagctaacccattgccatgttcaaaatgatccataatttggggagcctatttctcaaaaagaaataactctactaaatatgaagtagagctgcacagataagaagtttttctttttttccattttgcaatgctctgctctgtttttgaacttgatatgtcacttataacaaggctctagaaaaagcaatcttcaatgcagggtgttagatggaccccattagagtagaagaataaaggcctttagttctgtatgacatcttcagggtaaacaagggcaactccctggaggaaattcacttacctaaattagcatagtagtaaggaaaatctcccagataagatgaatactgtggtagtacgaacaatcctccaggatgtttgttccatattaaactgttacgtgatatgtgcttgaatattctgtcctgaataatctagaaaataaaacatagcacacagtgaggatgagatcctgatgatatttggaaaggatgatgctcaatccaaattcgaaagatggtggcagtcagagtagtgactctaccctccctcccactttaattctccggataaaaatgtctgcaagacagagagagtaatggagcaatgaaaaagagtgagagaaacatatgaattatagccaatcaaatttcctaattaaacttcagttaaaccataagttctatcttgtctttgtataataatgagtccatgctcattccaaaatagactgtgtggagcagttagtctttccctgatggttaaacttctaagaactaagataggttccaggcccctatcaagaagatctgttctcagagaacaagagaggtcaatgtagacctgtagatgctaaacggaaagcatattcaagacatgacacattctagaagctattgaggttttcagctgttcctttaattcaagaggtagatgtgtatacttgtcatatttcattttcctttcaaagtcaattggaggactttgggtgctggttactgaagtttttctatatttcatcttgaaaagtagtgagttaacaattgcttaaaacatcctacataataggacaagaaccatggcatatgaagactaataatagccaagctagttcattagtttctttggactttgggaccttgcagatcattaaattctacatttagagtcaaacatcctcccatcccgaatcatttgtcagttgaatgtgattagtccactttatagctttctctctgtgactttcaaactcttacaattataccatccactcattagaatatgatttggcaaataattaacttggtacagaattttatgttttcagcaattttttttacattaaaaaaaaaaaagaaaaaaatcctgccgtaagttttaagacatttaagacccaaatcaccattttccaggtctccatttaatgcaatgtgattttaagtacagactattttaaatggagttttattatttgctaaggttattaacaccctcatctcattccacatggtgactagataagtaataaagtgggctacatttatctttgcaaatcttatgtttattttcctaatgacagagaaggaagcaaggaggaaattcaaaagaactcaaatatcttagttcaatgatttctgcatcttatctttcacccagatcaaaactgctaattttatatggctggatagaggtttctaatttggtggagactttaggaacctagtgaaaatatttatttttactttttgtggtacaacagggatatgttaaaatgctgttgtcttggcattaattatgagaaaattgtcatagttgtgaaggactttttacatggttagcaatttcactttgtacaacatttattcctgctttttattatttgtactttccaaacgtactgtctatttatttcctttttatagtttctctttagatcctcctttttttgtttttttcttttcaaatttatgtaccttttaggatgtggtcacttaaataagtttggatatcaagatagaaaataaattgacaatagacagcattataaatcgaacctacagacaaatatcatggaactcacagctgtcacaaaatgggtcatcattcccatcaggtctttggatggtatgcttgtcattgtcatagactatctttttggttcggcatcacaacattgttatcttttaaaattcaaagatatgataataagatatagcactcttctgaaataacaacaagcattttatactgtcttccaacggatcttgacagaaagacataggacaggtacgaaagcagtagcaaatgttgaatttaacgtgggtcaagcaatttgccacctttgtgtattattttcctcatttgtaataaaacaataaaataccacattaattataacaacgtctcagaatttaagaatagctgcctaagttgttatacttaaggcttgatttttgcctttaaaaagaaactcactcctgtgttcgttttctaggcattggtttttccatttattacatagtggtaatagtatagatattacataatacagctatttttacatattaatagtattcatgattcattattcttaatgaccagtttagcaattttttccatgcaaagcaatgaacatatttacgaataaaattttccacatttaggattgattattcttcttcttctttttctttttttgtttttgtttttgtttttgtttttgagacagggtctcattcagttacgcaggctggagtgcagtggtgtggtcatggctctgtgcagcctcaaactcctgggctcaaaggatactcccgcctcagcctcctgagtagctgggaccacaggagagggtcaccacacccagctaattttttatttttattttttgtagagataaggtctcattatgttgctcaggctggactcaaactcctgagctcaagcaatcctttctccccggcctcccaaagtgttgggactacaggtgtgagccaccgctccagaccagaattgattctgtaggaccttgtcaaagggtataaatacttttaaggctattcattagtattgccaagtgtctttctaaaaggtttatatcaacttgccttctaaaagcataaagaaatatggaattcatttcaccatatagaaagatcatttttttccctctgcaattcttcctatcactaccctggatagctcccagaatcttttcatggcacttagtgcttagtctttattgtggtggaagaagacatcacattagaggttggatgcttctttggctataaacaaaatcaatacacacacacacatacacaaacagataatacaagactttttttgttatggtcctagatggccccctcgataaggacaatatttctaattgatgtgaattcaaagggaagaatgacaggctccttattttacttttatgtatcctctgttttccaaataatggacaattggttataggttaaagtcattctatgtagcccttcatcttttaaccagagcactgtagcctaagatacacgatgccaccatatgccacctcacttgaagccagatcaattgtctatttccattaccccattgatttttaaatatcattgtatgatagcatcagcaatactatggttcgtatgtgcatgattagataactgaggaggaaaatgaagcatacttcattaaaactccactaactatataccttcctagctaccactggctcttttcacatattatcataatctcaggcactttctttcactcatcttgattatgactaagctccaatgattcaatccttagtgcaggttattgtgcaatattctgacaaataatggaatccatgaaggagcactgtttttgcagtgttttttcattgtcctcattgttagttctcaattttcacaaaagtactgagctctacagagcctagtttgattaaatagctccttattaccaagatgcagcattagagaatttcaatcaaactggaaaaactaaaagaatcctagacagagttctgtacaatgaaacgtactaacaacctgaccctggcattgaagagaaaatgagatgtcctgttttcaactgagtctaagcactctacctacaactctagggctcataattgctgaagaccccataatcccattcccatggcttagaatataccaagcaaggagaaagacctagagtctgagtacagaacatccttagcccaggatcttcaactctatgctgtaactgtgagtaactatgaattattctcgtgccttagtagctccagcagtgactaaatgaagtatattatctaagttctaagccaagttcacatctttgatacgtgatacttaaattgttcttataaacacatttgctgtgttatttgtatctgtggatggcattttcttctatttcccctgattttttgattatgttgaattctggggtaatctgagttatgaagtattttgggaaactgggtagtacctgtcatgcaacttggttgagaggtcaaactgttacaatccaatcttggaactatataaagagatttgacagttgctataaattcgaatgaagtgtatggtttttagtgtttaaaaaaaccccaaaactgtgttgctaaaaaaaaataataataatacatggtttaaatacaaagggaaaaggccttttcaggttcagagatgaaaacagcttgatcttattttgatcctattctgatgaatgtaagacattcaactgttacaatagaaaaattgagaactgctaacttaataggtgagagaccatattcatgcaataaaccatatgcaaaagacatgtaattaatgagataccatctttcatctggcaaatcagcaaagtgatagatgtgtgtgttttaattatggatctgtaagactgacaagagcacagcaaaagagagtcacgcccagacagcttgtgagattctaggtggatataatgtttttggataataatttggcaaaatatattataagccttagaaatgcctaggctctttggctcattaaaatcacttcagggattccatcctaaagaaatagagatgtagtttaagatacatgtagaaagtcattgcttagataaagatatagttatctataaaaaataaaaagaacattaatagtaaataatggcatattggtttaagtaaatagaagttcacaataggatgcataatagagtaaaaaaaattaaaacactggaatgtgctctggatgtattagaggtaaacaactaataggatagaattgaaaggccagaaacaacccaaagatacataaaaacgtcatgagaaaacactgaagaaagaaatgtattggggctgggcatggtggctcatgcctgtaatcccagcactttgggaggccgaggcaggcagatcacttgaggtcaggggttggagagcagcctggccaacatggtgaaaccccatctccatggcgcatgcttgtaatcctagctacttgggaggctgaggcctcagaaatgcttgaacctgggaggtggaggttgcatgagctgagatggtgccactgtactccagcctgggggacagggtgagactctgtctcaaaaaaaaaaaaaaaaaaaaaaaaaaaaaaatcttaacatttggcatattatttgaaacggacttcaaattcaaggaatttatcctaaggaagtaatattgaatctgcacaataatttgaccttgagatgatttactgcaatgatgtacataaaggaaaaaagccagaaacaactggaatctacccaaattggggattaatttaataattagatgatatcataaatggaatatcatatagtcattaaatggagaaaaaatgtaataacatgagaaaatattaacattattaagcagaaaaacaggttacaatgcaagtatataaagactcctttttaaaattaaaagtacaacaaattttaaatttacatataaaaatgaatatatatgtttgtggggatatatatatcaatagtggttttacatgaatgaattattttatattttatgctttaagtgttttctattagtttctaaaatgaatgtatacttctttaataataactcctttaatcccaccaatttgggtagtcgaggcaggaggactgcctgagccaggagttcaagaccactctgggcaacataacgagaccttgtctccacaaaaaatgaaaaattagccaggcacagtagctcgcgcccatggtcccagctactcagaagactgaggtgggaggattgcttaaggtcattccagcctggtgacagagtgagatcctgtctaaaaaaaaaaaagaaaggcactctgcactccaaaaagggagaaacaataacattcaacattctttaagaagggcctaggaaggatcttagatggaggacaggattaaaaaagcaaagggtaactctattagctactgtgaacagaggtaacaactcaattgattttaattgaggagattgcttttggagggataaaagtttgcttgcaggaaggaagcccttggaagtcattatgatcctgtccccttcatgggaatgggcctgggtcttaaacagccccttttacccagttccaggatgaaaaaaatacacactatgcctaagagaacactgaccagagctcgccctagggtgggagcaggagcccaagctcagcatggggtggataaatgccctggtgtgcctggagcatgaccagcactggctctgatagtcaggatggcaagaaaacagcgatgtggaccaagtagggtgacttcagtttcttggtattactcagatttctcagtgtaggttccatattacattagcttttagagcagtcatcactcttccagagtgaattctccaaaaggaaggccacaatgcccccacctcattttgggacacctcagaatcacctcaacgaagatctctgctctcctttcttcaagcttgtaatgcatgcgtgtgcagtttcctgaatcttttcctagctctttgtgctacttcggtgtagcctcaggccaatgctatctgctctatttccaaaggttttaatcatctccatgcttcctttttctttttccgtcctgccttaaaaaaaaagcaacttgaggacgggcgcccatctgcctaaaagattttctgctttcacaaatttaacactttctgtgccacatgggtatgatcctgattctcctcttaacacaactttgccacattgacgctggttggctggcttgcctaagtcttgagaattctgctgtcccgcaatgccattggactgtggtgcccagaaaactactcatatttttggaatggtagaggatttgcccttacttggccattatatatatttttctttttttttttttttttttttgaggtggagttttgctcttgttgcccaggctggagtataatggtgcaatctcagctgactgcaacctccacctcccaggttcaagatattctcctgcctcagcctcccgagtagctgggattacaagcgtgtgccaccatgcctggctaattttttgtatttttagtagagacgaggtttcaccatgttggccaggtcttgaactcctgaactcaggtgatgcacctgcctcagcttctcaaagtgctgagattacaggagtgagccgctgtgccaagccattaaatatttttttctaaatgaactccagaaatatgtcttcgaaggatgccattgagtgtaaatgacaagacagtcatgacccacatatccctgaaatgatgtaagacagagtcaatctctgtgtcaataagtataatttctccccatgtaggttttcctttgtggagtttgtcaggaatgagagtattttcttggccatggcaaagcaggtaaaagaggttaaccaatatatccaagtacaggaatctggttttgccccactggaccaatcacacatccctaatagcaaaacagaaggctgagagaagtgtataaaggaccattattcaagcccaagagccaagtggtctcacttacctctagtgtagttaatacaatcttctcaactgaagaaaaataagcctcccacaagaattgtgtctgctgtctaagtgctaggattttatcctgatgaatagacctgattgtagaaggaatctgtaacacaaggtgaacacataggaattataactgtaaaacaaagagatgcacttgatcaaaataacccaactgggttaggcttttattcttcatagcatttggcttctagcatatagatctactaaaaatcatcaattcctaagttgaaatgaccttaagaagtgtcagctgcaaagagcacttactgggaatccaccccaatggcctttgatgtatgaaagttacagttcacctctaagattcagtagcaccttatcagttgcttaggttagtctatagtcacaattgctgtttccagaaatccttgaccttgcacatgaacaaccaaattttatagaggggtaactataggtcttggggaaaggccagaagactttatctcccaagcacttctatgattggtcaccccaggaactataaaatatctataaaaggactttttagagaatgtctatgagccttcccatccaatctgaagctagggtcagtcacttttatgtgcacataccttctacctcacctttgagcctttctgctccctatatctctctttctgccttcagcctttacccaagtctaactggatctctcaattgttcatatatgattagccatcactgctctcttccagggtatacaattttaaaggaaggacctatatcttgttatcctgctacacattttcaggttagcagagtggattttatatagtagttattaagaaataggaggtgaatataaccatctgaagccaccacagggacgtcattatttttaatggtagtataactgaatggtcaggcacaggggcacagaagtcagaaagatcaaggaaggagtgttgcctctagcagcatttactacctgtgctttcttgaatgagttagctgatttctcaaagactccacttctttacttataaagtggggataaagtactaaggttttaatgatgattatataagtgcttagcacagtgcctaaaacatggaaaacttaattaatgtaacatcactactattatcattattggtatcagggtgatgctattaaaagctggatcaattgcttaatgtttgcaagggaacctacttgggtctggagctctgaaatgtacttcctgagtctggtaagttttctgggcttgttccctattttcacctacagttcaaggtctatttcatttacggagtctatagtctttagggaagattccttgtgatttgcaattgcccttttgtgctcacctctttctgcatgcttgcctccataacatatgactaatccgacagatatgggagtctgagcaagaaggagaaatgctccgttagctgctttaataggaaagtcacccatggcatttgactaagactgtaacagagtttccattggaggggaaggaagtggtagcacattttttaattcagcactccccttaggaggagcaataaaatagcttcacagtaagaacagaaggaaaagctcacttggtttgacaatgtccaaaaccagatactaaatctgtgtcccaaagtgtatacctggatttgcaacactgaaaaaacagaggcaacatgtaaaggagaaatactggcaggcaaacattagcctgtaatcagagcccaaggtcaaatggaaataaaacattctttgagaaggtagacaaatcatttatatcatagaacctttatcagtgcaaggaaacttatttttagttactcactgagaaagttacctagatggccaaagaaagattagaaaaaaactatcctgttcaattttcataatcataccctcttctaaatgtcaagaggtaactgctaagagttatataggttggcatcactgttttatcgtagccacaaggaaacagtctattagaaaaatgcctaaggccgggcgcggtggctcagcctgtaatcccagcactttgggaggccgaggcaggcggatcacgagttcaggagttcaagaccggcctggccaatatggtgaaaccccatctctactaaaaatacaaaaattagctgggcatggtggtgtgcacctataggcccagctactcggaaggctgaggcagaagaattgcttgaactgggaggcagaagttgcagtgagctgagattgcaccgctgcactccagcctgggtgacagagcaagactgtcttaaaaaaaaaaaagaaaagaaaagaaaagaaaaatgcctaaagctgtcattgctatatagtctccagaaaattgagtctgctgtggttatgaaaggagaaaaggaatatcacagactcacctaccaatgctgttcccctctcttaaataacatgcatcttcatcttactacatcaagtgcaatgtattctaccggcttgtgatatgatacaagtgtctgacagcactctgcaaagtgctctggaagacaactccaattgattgaaaagacagagttccaagttttaatggcacttggctattggttattaatctgcttgtcctgagagacaggtatgggaaagtgataaattaattccaatttggctggattgttttggaagttgccgagctcaatgaagtcttaataaaaggtcatgtatggtagcaaaacaaatggaatgcaccagaatagatacaagaaagtcacattaagctctcttggtgacatgatgacaagaatatatgcaaataaaaacatcccagctgttctaaaacaggaaataaaaaattgtaacataacaaaaaaacatttcccagagcagacatttgggctgggtgccaactctttaaaaccattgttaatgatagtacacagttgctgctcaatatggaggcagctgtgcaaagacagactgaatatgagaggggaaaaacaccagcaagtctgggtgggtgggggtgacaaaaatcaaaatctttagagtcaagccaaaaagttgcttcagaaggtgaaatgcccatcaagtttggtgaaatggtagaaactggacaagtggctgggcgcgctggctcacgcctgtaatcccagcactttgggaggctgaggcaggtggatcacgaggtcaggagttcaagaccagcctggccaacatggtgaaacaccatctctactaaaaatacaaaaattagctgagtgtggtggcaggcacttgtaatcccagctactcgggaggctgaggcagaagaatcgcttaaacccgggaggtggaggttgcagtgagctgagatcatgccatggcactccagcttgagtgacagagcgagactccatctcaaaaaaaaaaaagaaagaaactgcacaaccacaattaagtatcctaaaatgcgctccataccaaagacaaactttcaatttgttcacatcaaattcatgggagcattggtatataaaaggaaaattatgggtggtgttttttattccctttatttctcaaatttcttttaatgatcatgtattatttttaaaataacatttgaaaaaggaagaaaaaaggctacatggacaagcacaacatgcatcactcttgtttggcttttcatgaataaatgattttagcatacactatctctgcatggggaaaactcttcctcagtgtttctgcaaggacttcttttccttaaggaatcacagtgggaaatcattggcataaaagtggccctttcacaaaaactccagacccctttctcaatgaacacctaagaaattaagttgtattcagggcagaataacttattcccccaaaaacagattctgtcacattcctcctttgtttctgagataatagggactatggagatcacaaactgagtgccagacagaagtaatgtttcaggagctgtggtcactttagtttgcttaacccatgggtctctcagttacagttagttcatttgttattttagggaaagtgctgtattacttcagcagtcagctagcagactgggcagcagcacagaaggagaatcaacaacagacttaagaggccaggcgcggtggctcacacctgtaattccagcactttgggaggctgagatgggtgaatcacctgaggttagaagttcgagaacagcatgaccaacatggtgaaatcccatctctactacaaatacaaaaattagccaggcgtggtggtgtgcacctgtattcccagctcctcgggaggctgaggcaggagaatcgcttgaacctgggaggcagaggttgcagtgagcagagatcacaccactgcactccagcctgggcgacagagtgagactccatctcaaaaaacacaaacacacacacatacacacacacagacttagaaactcaatttaatgaatatccaaaaactaaaagggcaaagacattaaaaaaaattctacaaatatttgtggtaattcaaagataaagtgtatggtacaacaaaagaaaaacattaaagttctagaattttaggagaaaagagcacggcaacttgtgttgatcctaaaatatgaatatacaaagggctttagaaatccttagtaatttaaaaaaaaataatacatgatcattcctgccctcagatttttctgagtatcgtatccccctccctaggcagctcttgagcaattcaaacttttattaggggctgctcatttaaatataaatcctaaagataacactcgctcagacacccagactggatcatttgaggaacgataacactaattacaagaacaagccctagagacctctctctttctgaaaattaatctgaaggcaagtgcagaaacagaggaaaagaatatgaaacagtagggtagaataaaaactctctggtaatatttctaaaaattctggttattgaaaggggtggagatccacttcttcttgaaaatcaaagctcccattctttacctgcaacttcttttcagaatatattctggggacctggggagattttgttggaaagtgaacaatgtcatattaaatgacttcatattcaccatgacacaggtaattttctcctgataagatttcttttatagagctgaccttttggattcatcttctttgaaagtttggacgggggcagcaataatctgctgatgtgttgaaggccacagccccttccttacctgtaataacaatctctcatcgcctatgacggcagcttggttccaattaatcacttcagagaatggcaactcccatccattgctgagcatcacagggacgcaggcagcctgagcaaaaaaggggacttcgtgaatgtgaggaaagcgacagcagaagctgttccaatcagaggtgaaatcagtacaaactcaatgactggcatttttgacactgcatgaatcctggactgcctaggccagaaggaaaggaagcttttatgagttatcaagtcacacgaaggttgtacgtatccagactagattttaatatttgcaagtcttgccctagaatgctaaaaccccatttctattctagtacatggtttggctgaccttacttccatagagacgactggccttgctggagaagtttttattgacgtaacaaaagctcgcaccaacaaaatctgagtatagaaccaaccttgaatataaacagtctggtcaacgtaactcccacaagtccacgtgcaaagtggtttaccccaatgtcatgagcaacaaagagcagaatgaagctcagcattcctaggcagcagttcgtggacttaaccagtatagagtgttcacatttcccttgctctgcaaacacccaaaccagaactttgttcctttcagtgtggagtgatctaaaccacagtcataccaatttatggtctgtgccgggaaataaacagccaagaaacactaggttaatgacaaaatactgattccaaataactcataatccaaatcagagaacaatttttctttatgcagcatcccaggaggctacaagaacattagtgatggcatgctatgcagaacacacacagagagcaacttggaaaagacattccagagaaggaagctcttctgttggagggcatgacagaatgatttgcagttaagatggcagagataagaagttatgaggcactgcagcaaaagcacagatttaggcatggtgcagggcaagaggaggaaagaacatagtagcaaagggtcaaggaatggaggatgagagaggttgagggcatgctttctctctgcaatcaaagaaggctggttgcaacttccaggtgggaaatgtggatgactgtctcaagaggacatttctgcagagtgaggttgatgagctgagaaactcccaccacaaaggctccagggctggagccaggacctctgaactgcagagccttggaagagctggatcatctgagtagtaccaccatgctggggatcattctcaaaattgaaaggaactgagagacaatgaagatgcaggcagaaaagacaattttgcttttagagagtaccacgaataaagggaaagtgtagggctgctttttagagtccagctaggctgcctggtaggccaagctggcaattagatttgccttctgtttctaaacatgacccagaagaatccaccatttaatttcttacatctaaaattactgagtaaatcctccctccacccctcacttgtcaaaaatgttttagattttcttgaaaatattttcagatcctcaagggaaaccacaccttctctttagctatcccaggagaggtgataatgttaaacccacttaatctggcttcggtcctcagccctattctgggaaggctccagggcctcttacctgcaaagcctccaggaatctgaaggacccaagcctgcgaccacgaggaaccagacagaaagtggcattgtgcagcatttcccgataatcatacctagaaagagaagaggagtaaacagcaaatgaagactcattgcgaatgtggggatattgaccataggtgggcgcccatgtgcatgaatttacgcaaagcaactcgggaaagccaccagcaggcagctctcacttttccattttgaggaaggaggttgggttgctgcatgaagagtaaacatgaatcatcatgttggacaaagcaattaggatcccttttgcaagcagtatatataaagacaagtctgatcgttctggcaacaatttggtttgcccagtctttgcttccaaaatcagatttttaagtcttgataaaatatgttgccccatagtcttaaaaagaagaagagaaaattactggtgcttctccttctcctttaacaatacggcattcagcaaaactaagactgttcttgttccccaccccttcaaaaccatgctattaaaaactattcagaaaacctcaatcacaggcacaaaacaacatttgtcttctctttcaagatggagtttctacacttaaccaagaacgttcagttacccaggaaaaatattcctgtttaagaatggctgacataactcacaggagaaagaggaggtgagagagaaggatgctagcctaagaaagggaaagaaagaataacgagaaaagaaaagaaaaaaaaaaaacctgaactaggagggggtacaggaaactggtctacagaagagatgaatttattttactcaaataccatttaatgatattacattgcttttgcttttcgaaaaaacatacaaaatatgagtgttacctgtttctttatgccagtgaagtttaagaaagataaaaagcatttcattttgtttaggactgtcacttttaaagtgattaccacaaacacattcctacacaggcagtttcaagtacattatgagtttaagaaaacttgggaaagtagagatggctcatgtcctgtaaaggccccgattcttagagccaagatgaaatcactctcatttttcaagagcttccaatgctgagcagacaggtgtgactttgacagtagcatatgtcaccaccactttctgactctaatagtctaatttaatcatagcctaaaggcactgaattcttccctcttctttttgggtatattggtatatacatttatatttttaaagtccacatctatttttatattctcatacaaactaggcatacgggagtaagccaattttcaattataaacccgccattaagaagagacatcatgcaaaggaccatttgcttaaacaagcgtgtacaactaatttgcacaagaaaaggtcaccgtgaatggattaagattatctccattgagagtaaaaattttctaaaacccttgctgcattaattaaattgcaaaatagacttcaaagtaaaaaagatttttaagaaggcttgaatttagttaaatataaaaaaaaaataaattagatggtagtgatttcttcatcctcaccaaacacaggaaaatggttgacaaatatcttcaagttcaaatgttgataatgttttaatctctgcctaatagatggagcagagagaaatatgcacacacacacacactcacaaaaatatatgcataaagtttaagctgatttttttttaatacagaaaggtcgaatatacttcagactacagcaaggtttaataagtacccagaatagaaacccctgagggactagcacagaaggtcccacattctcatcattagcctactaaaaatgtaaaatcctattaatgttctgcattgtaacaagtttcaaagttcctagttgcagaatttactttagggaatgtgtggaggaagaggaagggcagaaaacttataggaaaaattcaaatgacagttatagtgggttgcttaaatggttacatagaaggactatttgctgatatagcaagtaagattgacatgatcgaagcttgtattccttcacataataggtaataggagctgtgggaagaatacccttgcaggagttaggaaaccactaggtagctgtgagacttaaaaaacccatgaattttctatctgtttcctcatctgcaaaatgaactacttgggctagatgactatagattcagttttaatacttgattactctttatcttatcatttttgggtaagaaagaggaatgtcctttgagaatatcccactgcttaggtgtccataccattatatgtatgtgtatatgtgcacaattccatacccatatatgtgtgtatatgtatatacatacgtatctgttcatatgtatgcagtgcatgtctaacatatgtgtgtattcacatagaggctcatacagaacatgtacactcataccttagaacaatgattttcattcagatttctatgcatgctcagcctgtgaaccagcctctctattctactctctggacagtcaatctatgaattactaacatgttctacctgaaggaagaatgatgccccacaagtgggcagacaactattctagtttgaccacgtgcttgatcctctcctactcagcccattgtgatgctctttcacactgcacatcaacctccttgtagatgcttaaatccactcatttattcattcattctttcaagaaatactatgtttcagacactgtcccatttcaacagatagagtccagagaaggtcttctctagttgctggagctaccaaagaagcacctgacaatgagaaaatgctgatgagatgagaatttaagatataaacatctcctgggagtatttgcattataagaggagattatagaaggccgacctttcagaagatacacaaagaagtctgtggccactctccccagcaaaacagcaatttagtaacaatcataaaaacattttaagtctctgagaattgtcctaaggggataatgacaaatagagaaacagtcacccaagaaaatctaccaaatcttggcaagaaccatgagagtctgtggcatctggtccctgacctgttccatgaccaacccctactagctctgccttacaggagctttactctggggcagtgcagtcaggaaggctgggctctccatccccccaggtcccatcaagaaagtgaaaaagagcctacagaaagagagaaccaccgggcatggtggttcacacctgtaatcccagcactttgggaggcccaggcaggcagatcacctgatgtcaggagattgaaaccagtctggccaacatggtgtaacctcaactctactaaaaatacaaaattagctgggcatggtagcacatgcctgtaatctcagctacttgggaggctgaggaagaagaatcacttgaaactgggaggtggaggttgcagtgagccaagatagtgccattgtactccagcctgggcaacaagagcgaaactctatctcaaaaagaaaaaaaaaaaaaagaaagagagaacgtatttgccaatcatatatgataagggactttcatctagaatacataaagaactcttctgactcaacaataaaaagataaataatcaaactttaaaagaggctaaggatttgaataaacatttttccaaagaagacacacaaagtgctgctaaacacatgaaaatatattcaacatcaatagtcactagggaaaagcaaatcataactacaatgaatgagataccactttacacccactgggatggctataagcaaaatgacagatgagagcaagtgctgatgaggatgtaaagagattagaacccttcatacatttctagcaggaaggtaaaacggtgcagccacttcgaaaaatagtttggcagttccttttcaaactaaaaatggacttaccatatgacccagtaattgcactcttgggcatgtatcccagagaaatggaaacttattttcacgcagaaacttgtccacaaatgttcacagcagtttgtctgtaataaccttaaactggaaactacccaaatgtccttcaatgtgtgaatgattcaacaaattgtggtacatccatagcctacaatccttctcagcaataaagtgggacaaactattgatacacacgacaacttcaaggaaattatgctgcattaaaaagtcaccctcgaaagtgtacatactgttgaatcctttctatatgacattcatgaaatcacatagttacagggataaagaacacttagaggttgccattggttggggggaggaggaaagacagggagacttgagaggtcaaatggggggacacagtgttttaagatggactaattctccctcgtttcttatgtttagaaatgtgaatcacataatcacacactacttaaaagaaacatatgatatcctaagcaagaaggtaagtaggtgagggagacaactaaccccagataatttgccactctaataaatggttttgctacccttttcagatgggcattaagttccccacgtgtaggtaaagaaggacaaaaggtagaagaattttcacaaacgactacaaagaaaaatgcaataaaaatgacatgaccttgaatttaacctagacactagtaccactctatggccataatcattttatacttaaagttgtattgaacaatgtatgggatgcaccccatttaaaatggactatgcaataatgcacaattgaagtcctgcccctctgtaggaaacacatttttgctggcagccattctgtgcaactgggaaagatgggggagtgtagcatagagcaggggttctcaaagtgtgttcttccaatcagtggcaacatctgcatcatctgggaacttggtagaaatgcaaattctcagcctcacccaaacctgctgaatcagaaactctgggggaagagcccagaattctgtgttttaacaagccctctggataattatgatgcaccctaaattttcagaaccactggcaccatagttaagagcttagtaattaaa

SEQ ID NO: 28 - DNA, 166020 bp, Homo sapiens
gcttttcaggaatacttttgctctgaattcataaggttagagaaggcaaaattgcattttaagatgggaatgccaaagatggatgtagcccattgaaaacaggcaatggctttgagcaaagctagccccacaataacttgtaatggtagtgaagtttgtgatccatcatatgatcttttcttcctgccttttttcttcctcattaaataacccatttccctaagtaccagtttgtatatattatctttattattatttgtatatgtgtaaggagcacaaatgcaattttattacatggatatattgtgtagtggtgaagtcttagtttttagtatatccatcacccaaataatgtacattgtaacccattaagtaattttttatcatccaccctctactcaccccccaacccttctgagtctccaatgtctatcattccacactctatgtccatttgtacacattatatagctcccacttataagtaagactatgtggtacttgtctttctgtttctcaattgttttacttaagataatggcctccagttccctccatgtttctgcaaaagacatgatttcattttctatgtccaaatagtattctattgtgtatatataccacatccaatcatccactgatggacacttagattgattccatatctttgctattgtgaatagtgctgtagtaaacgtatgacaactgtaggtatctttttgacataatgatttctcttcatttggatatacacctagtagtgagattgcaggatagaatggtaattctatttttggttatttgagaaatctccatactgtttccatagaggttgtgctaatttacattgccaacaacagtgtgtaagtgttcccttttctcctcatcctccccaacgtctgttattctttgtcttttcaataataaccattctgactgctgtaagatgatatcccattgtggttttaatttgcatttatctgatgattagtgatgttgagcattttttcatatgcttgttggccatttgtatgtcttcttttaaaaagtgtctattcatattctttcccactttttaatgggattatttgggaattttttgttgagttgcttgagttctttgtaaattctggacatggacccctatcagatgcatagtttggaaatatctttgcccattctctaggttatccattcactctgaggattatttcttttgctgtccagaagctttttagttcaattaagtcccatttgtctatatttgattttgtggcatttgcttttgaggtctttgtcactgaattctttgcctagactaatgtccagaagaattttctctaggttttctcctagtatttttatagtttcaggtcttacgattaagtttttaatctatcttgagttgattcttgtatatggtgagtgacaggttatccctctcaagaatactgcgtattcgaggaaaaagaattccaagaaagaaactgtgtggacagcattgtggcccattaactatccttccagtttgatattcacataaatatcctcctgttgagggaggatggtaaaggagaagtagcgctgaagaattctgaggtccttttcaatattgtgaagtattctttatcaatgaaggacagttgttgttgcatttaactgattagggctttcccaatacccatcctaaattactagcaatagccattctaaattactagcaatagccatcctaaattgcataggttgtggtagttttcatcctgagcactgaaatttcatgagacatactgcaagtttttatggagaagagtgtgatcgtggtgacatgcttagtgtgggcgtgggtccatatggtcttgatccagcgatgtagttttgactataggccatttatttgtcacagagttctaagaatatcaggtatctcttgaactcctccttcctccaacttaaacaactggtccagggccatgtcaatactgatgtcaatgtcaagcgtaaattacttgtgatctgtaaacaaatctttacaatgccaaagcagtgtccttcagaagtaggaaggtatctctttttcaaaatctctgtcatatattgtcccatatttttcccaaacaggactttctcctcaggtctcactggtagaaatgggttcttcaacctctaccagacccctttccatcagacatcagtatgaatttgttggtttgtgttcagatactctgatgttctcctcatgttcttcaaccctcttccctctcacaaaaggaggcacatcattctcttcttagaagaagtcctcttaatctgatgtaaagcacctcagataaatagaaggctaaaggctattgtctctaccacttcatagataagcccaggcatcctgaatctcttttacactcacctgagacctccctccttcatcctattcacaaaagtacagatgacaggctcatacggctcagcatcacaatgtcttcccaatcctgtttcattaatttctaaagaattacactaaaataacaatcttcaaaaagtgcctatgtctaagaacctcttttaaagtaacttaatgtttctttctctcatgcaacaggtctctacttttaaaacttatgtatgtggccgggtgcagtggctcatgcctgtaatcccagcactttgggaggccgaggcaggtgaatcgcgaggtcaggagttcgagaccagcctggccaatatgatgaaaccccgtctttactaaaaatacaaaaattagccaggcgtggtggcagcgcctgtaatcccagctacttgggaagctgaggcaggagaatcgcttgaaaccagaaggtggaggttgcagtgatgagctgagatcacgctactgcactccagcctgggcaacgagagcaaaactccatctcagaaaagcaaaaaacaaaacaaaacaaaacaaagtatgtatgtgactctcttaacaactaaacctcctctattaggaatcttactactgtgttacttcatctcaaatcttttaatagtctcctggtgactttgagaagtatcatgaagaaaacctctccattttcactccactttgaaactggtcatgtcttgggaactgactcattctactaaccatatagcaaagagaaaaaacatagttcttagtttaaaacatgagcagttgtgtcacacatctttgtgttttggtaaattcatcattagagagagaaaaaaacatcagtggagtttaaaccctttgtcttgttaagtcacaaaaaattcgtgggctaaataaaccatgcagtgtcaagttcatgctgtttctataatctcattatttctggttcctcaataaaagcagggtaccagttattctaatttcaaagtgcctccctacactctcacacagaaaaccttggttaagaaataaaaagcatgctgtcattcaggcacacatgaggaggttagtcattttggttcattatttctaaataacacaacaagcccctgaaatttttgtagtcttcaaatggtcctgcaaatcgatgtcgaccttgcatgttagaatcatgattgcctgttgtgtctctttgattatttaggggaaaaaaaaggtattgaaatatatactaatggattatttagggaattagagtgtaatgaacatgggttaactttagtgcttcagagcagtatgagagctacacggttaccagcaaaggatgggagcctcctgaaagctggaatgctgcaaatatatctcatcaccttcaaatcctgaccactctttttttcacatgtattaatttaacaaatattattgagtatttaaagtgtgccatattctgcctacatctaatggcaacaacaataaaaaatcgtgatccttcctccaaagctcaaaagctactagagacactgatctataaagggatcataatactcaaataatataaaggatataaagaatgaggatagaaagtgcaatgggaagtcaccatattaatagattaaagaaaaaattcttagcatcctcttcataggtggtaagaagtcatgtgatggcattcaatctcctggccacaaaagagaaaccttatttctcctcacgaaatacaagaaaacaagcagaggagcttgttttcttccagtaaggtgggcatataacaatgcatgcttatccccttgttcaatcagctactggtttactctcttcccaggacagagggagtagcaaagctaattggttaattgtcattcactgagccttgtcaaggtaacctcttgcttctttagacatttgggctccaaggcagaaatggttcttctttcttctctgcttcttgtttcagcatgggaaacttttccgaagaagaccttccctaatcccatgggttaaaattgtctgctcaatgacatatagttctatgagctatatcacagagggtgtttcaggtcttttgaatttgatcttaaaagcaataggaaatcattgaagaatattaagcagggaagagacatgatcagttctgtgttttcaaaagttcaccatagctgccacatactgaatggtttgctaagagagcagttcagaggcctctgctgggccttttacaggagcgatggatggagaaacaaggatagattcaggatacagtttggagttagaacacacagctctaagtaattgaagagttgcagaggacaagggaaaggaaactgacaaggataatttccgagtttctgtcttgagcaactgcatgtatggaggtgtcctttttttgagatgggaaattctgcagaaagagcgcattcaggaacctggaggaggatcaggaactcccttctagacaagttgagatttaggagatatatacagaagctgctagcagtccagttggatattcgagtctatagcacgcacacacacacacacacacacacaaacacactctctctctctctctgtctctcacgagatgactgagatgaaaatataaatttcaaatttgtcaacatacatagatgatatttaaagccctgagtgtgaggtgatcccctagggagaagaaaaaaatgaaaggggaaaagaaagagattaagagaatgagacatggttatggctataattagctactgttaactgtcactgggaaggacttgtctttgagtacacaaagaataatgggcagacttactttccattaagatgataggatgaaggtgtcaggaatgttttctatgattttttccaggccaccccagtagttggcatctcctcccctctcccaatcccaaatttcatcctcaaaggtacaacactatgggatataagaagccttgttaagtgatagtagaggaatactctttttgatgtgtgttatttacttctaggtattaagttttctcccccaagagtgccatccgcgaatttgtagtgtttgtattctcactagctctgttagccctgttaaccaagtgaaatctccatgtgagaagccagagggtagctatcaaatcctaccattcagacactttatggaaatgaactgagtagattacaaaaggaagagccaaatgccaaataccatcctccccacatcagtccctaggttgacatttaggcaacagcctctgagtctatgaggttttctgagattgttcagaaatctagccaaggttactaaaaacttcaattcaagagccagtgggtctttgccacttacttagtgcttcatgaatatgcacttcagcatgtaccccttcctgttcttttttttctctttccttttctctgtgatttttatacatgatgcccagctcactatgggtccagcacaaggaaaagaggtatcaagtgtgagaagaatatgtgacagctggtgccatagagcccccatcaagggggaaaaaaaaaaaaaaacagaataagaccaatttcagtttttcctacagtgcttggaaaatattagctcacttgtaagccaaatttgggtgtactcatagaaagcatttcaaggcacagaattgttatttagctaaatgtgccaagtcaattcactcaaggttacagtataaccatccatttcttctttactctttccttttatgtttaatgacccctctcaaaacgggagatggtagaaaaatacacccaactttttgctgttcatggtgctaacactcagggaatctactatgacagtcgtcctcaaattttaataggtgtaagaatcacctggagcatttgttaagatagttttatgcaccccttctgattcagcaggtcagatgaacttgcatttctaacatgtctgcaggtgatgctgatgctgctggccctacaaccatattttgagaaccaatttgtacttgatctcccagaggtcccagtggaaatgagccccagttgctcacgtagtaacctactcagtaactcactctttcttcacttctttcccttccccgcgtgatgttcctattcctctaaccagtgttttctgggatcatctccctaataaactattttcactcaaatctcaggctcagtggccatttctgaaattaattcaaaccaagataaagacagagccacagggcaaataagcaaaaaggaaagcaatgggaaacgtctcagcaggaggctgcccacgctgctgtgcagagcactgctgcagcctcagggctcctggaagtttcagcggtatgctctctgcaagcctcactccagactcagtctcaggccagagcattaggtggactaagccttggactaatgctgcttttttggctgcctaaatgcccaagttcaaaatatcgatataatcttggatttctcactctccatttccctttatcatccaattgatcatcacatgttgccacttcagcctctttacttcaaagatgtttcctcatccacatcctctatgtccagttcaggccctccctcatcctttttcccttggcaaacaagagtcaagtgactgatgtctctgtccttagtctggtctctttcttttttgagacagattctctctcgctctgtcgcccaggctggagtgcagtgatgtgatcttcactaattgcaacctctgcctcctgggttcaagtggttctcctgtcttggccttctgagtagctgggaatacaggcgtgtgccatcactcccagctaattcttgtatttttagtagagacgggatttcaccgcgttggccaggctggtctcaaactccttacctcaggtgatcagcccaccttggcctcccaaagtgctgagattacaggcataagccactgttcccggccccctcttctttacatccttaatactgatgctagtataaactttctagaatgaaaatatgaccagtccctgaaaaccttctggtggttccttggataaaggccaagatcaaagaaggccatctataaccaaatccctgcttagttctccagtctaatctctcatttcttccaagcatacactgtacacttaagtcacatcaatttactttcatgatcctatacagatgctctctttcacctccatgcttctgctgacatgcctggaactcacttattcaacaaatattatactgaactccaaatctatgccagatactgttctagatggtagttatatagctgggaacaaacatgataaaaattctgccctcagggagcctcccttctcacatggtgagacagacaatatacgaaatcaataagaagaatgtcagatagtgacatgtgccaaggagaaagaagatacagtgcgatagaacaagaagttcaattttaaatgggatgtgaagggagccctcaattaaaaagaatacatttgagcaaaatcctcctggagagaggcagtgagtcttgcagatatctgagacaggttgtttcagcagagggaacagcaaggctgaaaacccatccttgttctccttttcctgcctggattcccttatctaattcatcctccaggttggatctctcctgctacctggagccttgcctaactcccattgtccattctcaactaaacatcccacctctgtgctctgagaacatctggccatgtgcttattacagcatttaaaatattgatgataataaattgcagttaacatgtgtaacgtacttactgaaggccaggtattgtgtggttcacttggatgacctgctttcaatactcatgtcactgtaagaagttgtgtatttatattatctcattttattatctcatccctgtctgctttacaacaaggaagaaattgacacacagagaagttaagtaacttgtttaacatcaccaagaattctagactgggcttttggataacagggacaatgtagctcccatatgtgtgcccttcacaatggtctagctctcaaaaaggatcactagctcaatgcttcaaaaagaccttaacatattcatttagtaaaatggaacttctctctgtatcttaccaaatcatgatcacatgaatctatacatgtttgatgagtatgtttgtgatgtataacttaaaagtgaaatttatttggtgagactctggggtcacctcacaaagaaagactggcatctttcagagaagctggtatggaaatgaatgcaaagctgtttggctgcaaattgggagagacctgctctatgaattaagactccatagactgagggaaacagtaatggtttcaatgaaaagctccaaatggaaaatcagatgttcagaatcacagatgttgatgtatcatcaagccgcttctcacatgagcacctccacattgctctccaggtgagtggcaagtctccgggtgagtaactccagggagttatttatataattatggtcaacaattctcccaagcaactccatgtgggcttgcaagtgtctaatatttgtgaagttctgccagctaatcttaccatttctcagctccagaattgtactacctgtctttctagcctagtgtttcctaagtggcaatgattttgccctttgggggatattcagcaatatctggagatgtttttggttgtcacaactggtggggtcaggtgctactggcatctagtgggtagaggccagggatgctgttaaacatcttacactgtacaagacagtctcccgcaactgagttatccagtccaaaatgtcaacagtgccacagacctgtcttgttgccttttataatccaaagtagctccctttggttctcacccaatgatgtgtcaagagtataagcactgtccttgctgttgtttactggggagaattattgttgcattacatacatttcctgaagttgaattgggatgaatcattggagcaaaaatgattctcaggttgctgcttcagcctggcatgctcttcataccctgtccttggggtgaacactaattccccttgaaactcagaagtgccacttccaatatgaagacttctctaacaccccacagggagaaataatcaccttttcctttgcaccccaaccatatcccgtacataattccagcaaagaaaccataatacttcattgtcattattgttacaagcctgtctcctttaccacatccccattagcccttcactggagctcagagaccatgtcttactatttttcatttcccatgcccgtagcacagcacctggcccttaatagacatttaatgcacgtatttgaaatgaatgcattttcagggagaaatctggttctcgcagttgttctacattcagctactctaatttttaccataaatgtgactttcttctccagtttccaaatagaataaaagccaagcaaactacgtggcccatccctttgccctcagcctcatggcccatattactaatgttcaagttcagaagacatttatccaaagccccaaaacagcaatatgaaagtcctagtgatggtgggaaaggatgataaaaataggctgcttaaaaatcaagcacttttgcacagaaaaaaaaggagaggcaaacagccactggcaccttcctgtgagtaacagaagtttctattttaaaagaaaggcagtcaaataacaagcaactttatcacaatgctgctttcccagattttttggccaaggcaacacatcagcctggatcagactcttggcattccatgatggaccccgctccaatgatgattcatagcagccatgtgaggaatggagactttcacacgaactcgcctcttaaaaaaaaaaaaaaaaaaaaaagccagctattgctgatatctccagatatcagccagtaaatgcagctctgtcaagcctgcatgtggcactcaactttcctcggtaaatgacaaggtaagtgatgaggtggccaaaggcctggcctctcagtggttccccatcattttactctcaggtagccaggatgtttcctctcttggttcagtgttcaagtatcccagaagtttcatgaacacagtggaaaaacaaatctaatccttgttttctttcttcactcttaaactttctttggttttgagtaatctgtgtagcttttggatggctttcacattaggaatttaaaaaaaaaaaaaagttccccttacatcattttgacttccaggtattaaatagttgagatgtctaagtttgtttgtgttttcattaagttaacgtttctatcaccgtctgctcctgataggcttcaagaaaacaatgctgaccatttaagaataaaacagcacagttcattggaaggaaacagaagggatgaatgctcctcgtagcctaaaccgagttgattatcattcttgggcacaatgttggcttcaagttttcctgaagctaagccagaaaaaagaacagattgcaagtgtgtgcatgtcaacactgaggaattcggatattgaaaagcggggaggcaggcccccacatctctttcctgagaaaggctcaggagcagggggagcagcctcctgtccctcctaagagtgggcggtcctgccctacacaaagtctggcgagaggaggaagtcactctgggactttcccaatgataatggcaacatgtcgctggacttctgtctaaatgacgtgctcaagggcacagatccaaaagagaaggtctagaacccaaaatgagagcctactaggcaggacaagcagggtgctttttaggtctgtgatgcctgacttttaaaaagcagtcccaccatggaatttctaaaattcagttgattctttcaaaatagcgaagccaggttggtctcaaactcctgacctcaaaccctgtctctactaaaaatacaaacagttagccgggcatggtgatgggcaccattgcactgagtgacaagagtgaaactctgtctcaataaataaataaattaattaatttaattaaatagcaaagccctaacaacccagttgctattataagtatctgccacttattaagcatttttcagtcaatcctcacaataacacaataaaaaaagtaaggacacttattaagagcttccaggtagcaagcacggttccatgctctttatgtacttacatactttaatgcattaaactctttcaacaactccatggagtatttactatgaccccagtcttgctggtgaggaagttgaggcacagagttatttaatggtgtcaccatcacaggagtcctgactgggggaggtccagtatgaacctagatttctatctcctagatcatgcctttatttatttttaaataacagctttatttttatttatttatttatttatttatttatttatttatttatttagagatggagtcttgctctgtcgccaggctggagtgcagtggtgccatctcggctcactgcaacctccacctcccggattcaagcgattcccctacctcagcctcctgagtagctgggactacaggcatgtcccaccaggctcagctaattttttgtattttagtagagacggagtttcaccatgttggccaggatggtctcgatctcctgacctcgtgatccgcccaccttggcctctcaaagtgctgagattacaggcgtgagccaccgcaccctgccaataacagctttattgagatataattcatatatggtataatttattcttttaaagcatacaattcagtgattttttagtatattcagagttgtgcagacatcaccatgatgaattttagagtattttcatcacccccaaaacaaaccctccacgcattactgatctctcccatactccttcgttagaccttggcaaccactaatctactttctgtctctccagatttgcctcttctggacattttctctaaatggggtcatataatatgtggtcttttatgactggcttctttcacttagcataatgttttcaaggttcacccgtgttgtaacatgttttagtacttcattactttttattgccagataggtcacaggtttaactgctacactgtgctcctctgaggctggtattattattctcattttacacacgagaaaactgaggctccatgaaataaaataaatgacctaaagtcacacagatagccaaaggtggatctggcatctgctgaccccaaagtcatgcctcaaaaccctgccctattgcctccacagcatgtccttccttagagaagttacctgcacaagggaatttagtctcacgtgtcctggtaactttcttttaacttccatgaaaggtgataaagaaatgattaagaaaatgcacttcagaattaagctcaggaccaagctgtgtgactttagacagatcatttaacctttctacacctcgatttcctcatttgtaagagaagaataatgacatccacatcttagagttcaaagacactgattgtaaatagtgtggtccagtgccaggcacacagtaagggctcagtaaatcctaattcaatcaattagaacactgttctggggcggggggtaggcattgaggcaagtccaggacaaagaaggaggttcagctgcggaaaaaaggaggaaaagagagagagcgataaaattacgttgtatgagaatgttgtggttgttttcatgcctgtgtctctaagacaaatcagcaacatggaacatttgcaaacacttgatccacaccaagacgtctggagaaggccccaagggagagctgctccgttctgccctcccttcaggccagctgggggtgcctcacttgtttccaatcctaaatcatttgttgtcaaagaattcaaaaattttgagttggggggtggagatttcagttttcattctctgggaagccaaaataggctaaaacagtaacctcaacacaagcatgccaattacatattcaatcaaatttatttctgcattccacttcatgcaattagagaagataagtactagtttcaggatacacagtaggtttctgagtttttaaattaaatcatttataattaattgaaaattgtctttctcaaaagcaatgcaagcctacttttgagatcttactagcaggccctgtatcaatttggaaactgcagacatacaacaagggatatggaaaagacaacaactaaaataagctctttttaaaacagaagagaaagaggcaggctatttaatgttacaagctataaaagagcaagttatttcaatcactaaatgaatttaatttttggttttttgcctgcaaataaagccttttattcacttattcaggtaatgtgcacctattggtaacataccgattctgctgcaggtttcagagaattcattctttgtcaatgaaattttttaaaaaacagttgtttatgcagggggaacaggaggaggtgagctgatttgaggacatttttcgatggttccgttcatgctcaagaaaactgtacatgttagacctaaatcattgatctacctagacctggactctgcacactaatctaaaatgtttatattttggaaagcagagggtgagggaagaagcacattagcaaaggttgcttggcaccatcccgggctatttaaagatcatgtgtgcattgattcaaagaataatttataagcatctattacaataaagactagaagctggtggctggagaattttcactgtagtaaaccttactttggtggccactaataaaccatgcatgccagcacccatgactggtgtcatcccctcccacaccccatccaatggatctggacttgcccatgggactggctttggccaatgggatattagcaaatatgatgtaaagagatgtttgtcttcttggaaagcttgttttaggaacaaacactcttaaaacctagactccgtgctgtgagaagcacaaattaaccataagcgggagatttgaggccctcgctgagagcctcagctgagttctccaccaacggccaacatcaacttgccttgcctgccatcttggaataatatcctccagcacctattgagcctcccctcatgggtcatactagccaatgctacattgagagagatgagctgatcctgctaactcctgttcaaatttcagaataatgaatagaagaataaacgttgttttaagccatcatttagttttgcagctttagataaccaaaatagtggtctgaccatagcaccaagcacagatgtgaagtgaactctgctcttccagcccaatatgcaccttcctgaatcaccaagaggaagagagcctgcctctgacctacactgagagtttgagaaggctggcttatgccctgatattcccaacaatattctctttaatatcaacagcaaaagtatcatttattctgctctttttaagtgccagagactgccaagagctatcaatgtacacatatgtagcatatcattttgtccatacacagcctgtgagaaatgaaatatctctataagaaggttgaggaaactgagacttaacgaagttaaataatttgcccaagaggttccaggcgacgttccagtaataaaattaagattctaactagtcctttactgctaaagccagctttcacccgggatatgcctcctttacactaggaaggcattgctgacccacttccatagcctgagtctcacattctgttaccagcagaggggtaactactaaggggattctactaatcttacaacactctctagcctttatcttcccaagcatacatttttttagtagttgccaaacatcaggcaacttctgccttctaggaggggaaaaaaaggaacccattcttggcaacatcccactcctcataggtgttctcatccctggttcatctccagccaccagccacccacctcagcttcattaaagagcttgaatcaccaatgggaaaacacccacccctggcctgacctgtcacaaccatactccttgatgttctctagggaaatatgcacacaggggacagggccaggaaaagaaagtgttgttactggttgaatgctggaccccagatgtttgtacatgccagtattgtataatcataacttttatttgcactaggcaaccaaaaaaaaagtttgtgtgactttctttactgcaatatttgctttattgtggctgtctggaaccaaacctgcagtatctctgaggtacgcctgtatgtttcaaatgttaataataataattacaaagggacaaaagagggaagatgggaagaggaggagaatgaagatgggtttatgggggagaaagataggagttctgaggttgagatctactgttaacactccttgtcaatacagcatgccacccactaataataattattcatttttaagtctatttgacctgttaaatagtgaattcattgacaacagggatcctgccttaggtaaatttgtaactccatcttatacagcactgacatatacatttttaggatgatggagactgaatgaatattttttcttaatttctacagttttcctagttgctggcaccttggccctgtgtccaaactccttgttccaccgtttcagcttctgtgggccataaatcatgatatgacaggaagacattgagaaaattgtatttggccaagatgcagaatcccaaagtcttgaattatgccctcccacagactcccttttcaaggaccaaagaagatatacgcagagaagaacagtaaaaaacacacagttgttacatgagaatttagcatagtgaacaaagctggatgatgtgaaggccctgcccagcctaaaagcagacctaagcaggccttgcttcttttccctctggattcatagccacgatgaggggaaatgagtccttggagaatcccaccaaggtcaagcaagccagagagcatttgccctttttagctggtctagtgggcaactgcagggcatccctagagcagagtaactatcaagcaggtgcagcatggagcctatttctgcacctgtcatgaggaagaaagagagaaggagaaagaatgctccaagagatgacaaaggactccagagaaactgctgccacttgggacccagggcggatgccccttacttattagcaaagatgttcaagcctctagcattgtggcacagtaaatggccttgaccttaatccattatcagcatttatccttgaggatacaatttggagcttggtgtagaagaggagcttccctcagaggccaggatagctctgaagacatggcgatttgtttttcctggtacctgctatcttactttgagctgtggtacttttaccttactgtttcttgtttttctaccacatctttgcatctttgcatttttggtcccatctctcttgaccttgaactcaacgtacatgccttatctctcatgagttctctgtgttcggtcttgggaaaagagaacaggaattttcttccagtgaattctggaatcttcatttgtcacctttctcctcacgttttccttgctggaagctgcacacacatactcacacaacacgcatgcatccctttgccttctgtggataaataagattttgtgtctcagagcacaatgctctcttgggctctaccttttggtgatatttttgaaatcaatttaaagtacccttgatatcccttgaaagttttgtaagatttaaccccttaggggaagagtcagagggcctctctttacaccttacatccctcaccctttcaatcccttgggtaagaagagacatctgaaaggttgagatgcagtctttactctgagaacctccctccaaaactgcttcaactgctgacagctcacaagacagaacgttgagttaatacccaatattaaacaaagtcaaaaatcaaatacatcaatcacctaactaaaagcacatttcaaaggaagacatagccaactggatggcaatcctgagcaacacttgccttggcaggtatctgatgaagacactgctctgtcttgcttccaaagtccttctaagcaggcagcttggcaggccagtcttggatggagagggatgcctccagtttccggagccagagctgaggaaggagaaagtagaccacctgcaggcagtacaacactacttcatacttccctaatgcctcactcacattagcacactgatcttgcctatgaccttcactgagctagatcaagatccccatgctgcagtgggaaaacaaatatccattgtctactgatacccactgggtcacttttgcttttgaattcttgaaatctggattccctctcagtgtcctctaggttaccagtacacttatcccctccaaatcagggcatagttgcaactaagcaattaagagaagactggagaccagtgggattggaaggtaatggtgtcactggagtttctaggcttttatctatccagacctctccaatgtcttgtcatgcatcaattctctcatccgatctttttgggaatgccctcatcctgggttaccaaggagcacctgaagcagaggataagtgaatgcctttctcaaggcacagggcaagacattggtggtcttgatttgctccatcaaccccacctcccagatttatgtttgaactgtttgatcctggtgctcacatgcaggaacaggacactggagtgtgaaacgacaaaatacacctctttcctaaagcaaagcaatctatcttgagcacaaagcttgtcatgacactaaagcaaatcagtgtaaacaagggcagagatgagaaccataatgaagagtttgagaaattgtaaagtggtcctgaaaggaagtggtacctcttgagaatagtcctataaagtgtatacctgtcactaaaagatgcccaagacactgaccttaagccaattaccatgtgtagatctgctgtaaccaaagaaggtcacagatattcgattctgcaaaaagcagcttttaaaaataaaagtcaattcttggcatgtgttgcaatacttcccctgttccaaacataatactgaagccacccacaggaccgctgtcttagccaaatacagtaaggaaacaagccttctcgggaaaggcccacatgaatagtatccaagggccaaggtcaggtatcaatgcaaaccggctgcaaaatctcctcttctagcaccactgggcatactgtagctgagtaagccagcgatactctgtccagctttctcaaagtgctgctcataaagacaattccatagactacagggacagatgtccgctggcactcagaacttcagactctggggaaggctctgcccagtttttgcctgtgaactcaatctctataaaacagagttatggcaattgagaaaaaggcctctcatacagtctccatgtaatccagagtatctgctttctgaaataatttactgatcttttccctatacaatttttttttttgagacagggtctcactctgttatccaggctggagggagttcagtggtgtgatcacggctccctgcagcctcaaccttccaggaccaagcaatccttctacctctttcccccaagtagctaggaccacaggcatgcaccaccatccccagtgaacttttttattttttgtagggaagagttctccctatgttgtccaggctcgtctcaaactcctaggcttaaatgatcctcccacctcggcctcccaaagtgcttggattacaggcgtgagccacaatgcccagccctataattctcattgtcatagctagatcattacatgcaggagggcagagacgatccagctctagaagcaactttaagccattaggactgactgcttccctccaaacttaccacacacttgggttcaaaaaaacgggaccatatttcaatgttttgcattattcatgccatagtcctgaactattcactctaattcatctcatttcttgtttcctgcactatttttcctggcttttaaccttctagtctgtcttctgacggatgatctttccttgcttcttgaattgggtcctgaacctgagaccttcttcagcagtgggtaagagaactggctttgaagccagtttttctttctttttttcatattatactttaagttctagggtacatgtgcacaatgtgcaggtttgttacatatgtacacatgtgccatattggtgtaactcatcatttacattaggtgtatctcctaatgctatccctcccgcctcccccaccccacgacaggccccagtgtgtgatgttccccttcctgtgtccaagtgttctcactattcagttcccacctatgagtgagaacatgtggtgtttggttttttgactggattaagaaaatgtggcacatatacaccatggaatactatgtagccataaaaaaggatgagttcatgtctttgtagggacatggatgaagctggaagccagtttttctaaattcaaatcctgatgctgtcatttattaacagtatgatcctggacaagttattttaattttctaaactttaattttcttaactgtaaagtggtgctcataatagcacctacctcttggtctgcagtccagtgctcctggccgggcgcggtggctcatgcctgtaatcccagcactttaggaggcggaggtgggtgaatccgctgaggttaggagttcgagaccagcctggccaacatggcaaaaccccatccctactaaaaataccaaaaaaataaaataaaaataaatagccatgcgtggtagtgcacatctgtagtcccagctactggggaggctgaggtgggagaatcacttgaacccaggaggcggaggttgcagtgagccaagattgtgccactgcactctagcctgggcaacagagcaagactccctctcaataataacaataataataacaataatagcacctacctcttggaattcttgagaagataaaatggtttatatccaaaacaattagaacaacaacccagcgcagctgaattgctcaataaatgctagcagttgtgaggcatttttcagccacctctacagccatgtggacactttagtcagcctgagagaatacccagtacaggtcatctcccagatattttatacctgataatccatgctaggttcactcaagcaaacagagaagaaagcatttatttctctttgctctaacacagaggaaagcattatgataagagctaagattttcttatccagtgattaatttcttattggatccagctatttaaatggagctccacagagagttagttaaattaaacacaaaatttcttcttttttttttttttgtcaaagaaacacttgccttgctcttcactatatagtaaaactcactaataaaccacaacatgtcttacatgtctgttcctgatctccatacttgagtggtcaccaagaaagtattgtacattcaatccatagcatttaatttccatggaccctgcctttaacaggttattatctggttgttaagagaagactaacacataagacattatcaaagaacaatagaaggtatataattaagcactgagccaagtaaatggtgccgattataaattcagtagttctggaaaggacacatcaggtaatgggttatagtaactcacctattcactcaacaaacacttactgagtaccatccaagtgccagtttctgtgctaggctctgaacgtaggtggaggacattgggatctttcttccctgcagtcttccattctttcctacggccccccatggtataaccatcatgcagctgggtcattcattcttctgagccaagcatggtaaattcattcaccttgtcagtgattggttcctaaatgaccattgatgttgagaagaattggcttgaaacttctgggaaagttcctccttggtctgaagaaactatcccaggaagacatacaccttttcccttggttgatgccaagcatggatgtgaagtccttaactaccacttacatcttgccaccagcttgcaaatagagaagcaagggcaaaaaaaaaaaaaaaaaaaaaaaaaaaaactatagagaaacagagtcagtgccattagattaagtcaagttttcatagacccctacttttgggcgtccagtaaaggaatccagtacatttccttattcacattagcttaagttttgcgcttttttttttttgcccctgttatttgcagtcatacatattctaacttatagaacacatgaaaaagacaaatgaaatacaatcagttctcaaggtgctcacaggctattgttaacaaacatgtaatcctgcagcattgtaatttgttagttaagtacaaaagaataatggttcaggaataaaagtatatcaaaggaaggaggagttggcaagatctaagagaggtagctttaccaactttaattagtctttgaaggcagtcagtgaataatgataaaacagtgagtaattggcaataccccagcttatcactgcaaaaattggcttaattcctattgctttgtcaatttcagttgttattactaatgtcttaagatagggaaaggagaatctcttcctagaattataagctaaagaatatgttcctttagtttgattcctgtttctggattcagtctggaagtttctgtttgcaaggctttttttttcttttctttttttcttttgagacagagtctctctctgttgcccaggctggagtgtagtggtgtgatcatggtcactgaaacctctgtcttctgagctcaagcaattctcatgcctcagcttcccgagtagctgggattataggtgcctgccaccacgtccagctaattttttgtatttttagtagagacagggttccaccatgttgcccaggctggtctcaaactcctgacttcaagtgatccgcctgtctcaaactctcaaatttctgggattacaggcatgagccaccatacccagcctaaaggctattttttatctctaaagatgaaactggcttcagaattatagaaaatcagaacattttacccagtgtgcataagttttcgtaattatgtgcatgtaaggaaaaaaacattttttctgtttgatatcattagatggttgaaattacactttcatctatctttctctacagaaagagatttttttctgccagctaaaaaaaatccagatattcattgactagacttgtgattatctattttacataagacttgggcttcatcgtataacttaactgtaatattgaagatttccaagttaaatttgggaaacaatgttaaagccttgctaagattgtggttaggagaagccgtagtatagaagctttatttagttgagcttcaaatgctcaaattaatttccagcattttccaatgtttataaataaaatcattgctcatggcaatgtttccgtgatgggactttctgaggaagtctctcaggagaccactcaggtccccagagttggttagcagctccctacatgctgtctggtgtgctaggaaataaatttacagatattaaaaacctagattttagaatcagactgacctgggttcaaatcctggttctgtaccttattagctgtgttattttgagcaagttacttagtctccctgtgtcattgtggtaaaataaaaacaagctaagattattttgagaattaaatcaaataatatagtcaagtttcttaaaagagtgtctgacattcattgtctttgaacaaatttattgaactagagacataaggcagacaaaagtaacccccatgaggcttctgtaacaaatgctcaacaaataatatccaaatagccattattatttttaataagatctgtttatttcctgggacataaccattatcaagtgctcggagagaaaaatcaaagaatgatcatagattcctccattgcctcctgcctcccagcccatatccattctatcatgtcatgctttgagaatgggtcttctccacttcacctgctgccatgccagtccaggaccgttatgcaaatcatagccctttttttgaacttcttatgaccatcttggccatccattcttcttacatccattctgcacatactggttgctgattttttttttttaccattaacatcattgattttatttgccccaaaccttcaaatgacaaaccattccacgtgaaattaatgtcaactcttcccacgtttcttgagcggggtgctgccttacctcttcttaacatcatgcaccctgtatagcactattttctagacaccctagccttcctgatgctccttcagcaaaccaaaagccgttgctctcactcttctccctcctatatcttcatagagctggccccttatcatgatttgaaagtcagctcaaatggacttccttaggttgttcttctgcagccggtctcaaaataataccctattttgtcttcttcataatatgaaatgagtttgtctacttatttatctttctacaacttctgtagctttctagaatgtaagatgctataaaggcaaatacctcatctaccctgtcagctgctagatcccttgtgccttaaaagagtacatggcacatagtaagtacataatgaatgtttgttgactagtatcatactgagactccaaatgctgcttcagtttattaacaagtttcccaagtcatttaacttcctacttgggggagtttagacccttagagttatgagttcaaagaacagagacccagggaggtgatgagtcttacagaattagttagtgttagagcctagacaagatccctggggcttctaagatctagatgagcaccttgccataatattggtttgctaggcatgagtcctctgaccctctagattgtccagaagaaggcaatgaagtttgaaatcatatcaatcactttcaatggaattaagacctggactgggtggaggaggagaactatgctactgaaaccaaataaagatggtacaagggcagagaaggcactagagtacagaatcccacacacacacaaattacttctttatcaccatgagtggaaggacctcagattcggagctacaagttgtcaacattcaaagcatgtatcgaacactgttctgattaatagaattatagaatctcagcatggaaagataacccttctcacatgttttacaccatttacagtatgtctgcctagaagtcatccacctcactttaagtatctacagttaggaagaactcactgaatcccaagtaagcttattctgtctttcaacagctctgattataagaacatttttcattaaactgggctaaaaaccactgttgtatattttattgattctagttttgccatgttgggttatctaaaggcagctatcatgtcacccccgagttttcctttgtccaggtttttctaatactttttctatggaatgatctttcattgacaaaaggtttatttttgctggtctttccctctctacatggttggatatatcagcattcctcatgaagtaggtcttcaggtataggaagagcagtttagaagccagaactttccttgcactggaaattatatttatgtaatgtaactaaagttattagtctatatgagtactcgcaaccacccccaagccacctccagcccattaaaaataatccagcattgacttctaggttcccactccctcccagtcctactaaggaaggatttttgcttgctgagagagaagctaagttgacctacataataaagtgataaaggggttgtggcctggttatcaaggaagagtttttttggagctcaagtttataagaaggaaacactagagcaactgcgggtataagggaattggagagaaaaagaaaaggtggcattatgaagcaccaaggtggcttagtaatggaattctcttagatgttctccaagaaattcaagtagaaatttctagttccttttaactgcctttagttgttacactatgttcccttgaatgtgacacaccactctatgacaacagtggtcactgaatttataaagttatgcacattaaaaattaattccatagcaatgataatgatttatacgtacaattatttcactgtactaaggagttgacatttattatctcatttaattcttagagcaagcctttgagatacatgctattataatccccattttttcagatgaggagactgtaaaacagaggtaaaagaaattgtttacagctaagcaatggtatagttctcagacccatgtctgtctaactctaaatcccgtacattatgcctcatggtagtccttgagcagaatggcctcagtgcttgtccagaaagaaaaagataaacagctagagggatgagcctggaatccaggaattatctgctgctccagggagaccatactacctaaaacctgtctcaaggctgacagtccagcactgagatcattgagatcagaaacaaaatcaaactgatattgaggtttctggaacattccttagaaaaagatccaaactttcaaaaacttcaatcttattttccacaatattgatggcacaattttagcccatggctatttttttccttcttgaacacatcaattcagaaactttaaagaacaaaattgtgttcacaaaaatgtaattgataaaactaactctttcctagctgactttttatggcttcagctaaaattcaagctaaactgaattccataatggaccatacttcataataattgtagtctatttgtatgcaaatagctgaacgacatctctcaatttcagactctggctgtaaactcacatcagttttgggtagattctaattatgaatctgatataataggtgttgaattaatgagaatctctgacaccagttttgagagttaacactcattattcactatttgaaccttaaaaatggagtatctttatgatagaatgtattgggtggtaccattatctagtaactatttgatctgaaatggttatttaatttcttccagaccacagtgttagaaaaatgagaataataatgattccatgataggattattggataatgaaaaaagataatgtatacaaagtacttaggaaaatatttgtggatcaataaattacagttttttctgctctctgttgctagatcagctgaaggtccctccaagtggccaaaacttagtaactccttcataaggcattgccttgctacagatgtcctcaaaaagcttccttccgtgatgagagcccaactttaatgtgaacacagagacaatctttaataagaactgaggaagcaggaatcaaactcataagacagggccaggtagacacatacataaggtctgctcagggtcaacaacttgcccacctagtatcacataacaccctctggcattaatgatgcccatcctgccttgcatttctgaggacaagggccatagaaggaaggcaacgttctttccaggggatgtttatttttccattaataaagggaaattactttgttggttgagagcccagattttaaaattactcccatggctgtatctaaaaccaattaaatgttttaaaactcaaatttgtttggcataatagagttgaggctgtcagatcttgtgacatggccagtcataaaatgttccctgggaaccgaatggggcatactggggggagtgggaagagagaaatcataatcacttatgttcagaggggcatagcaaatgcctgggtcaaacccagcttctgagaacaggaaaaaatccatccaaatgggtggaagatggttatcctacttgttggcagtatagtgtgattaaaggacaccaggctttagaattggacaaacagatcttggctcacatccgggctctgccctttattatctgggtgacattgggtaagttactgaccttgccaagcctcaatttcttcagttgtgaaatgaggatcataatattaatttttttatggtggctaggataatgtaagtaaaacacttggctcaatgcctcatggattataagtgctcaacaaatgctagatgtagttattgtcattttattgttgtcgtttgtgtgttagcagctattatgtactagttaatccacctattttgtctcttttctttaggataaaacaccctgtgatgttactattaacataccattttatagaggagaaaactggctcatatatccaataccacatagttaagagaaagcagagctgaaattagaacctaggtctggctgatttcaaagcccatgctatctccgttgcttccatcactactgtggaagtgaaaagcttcacttgtaagatgtgggctgtaatctaagaaaggctttgatatgtgaaagtaagcaataacaggacatcctgacaggtgagtatgtagaatcctgggggaaatttattcagagatctggacaaacagggctgtgttcagggatatcagcaaagtcgatcccaagggtggattcaagggctcaaggttacaaggccagactcagaacagagctggctcacacaccagggtaggtggctccaggttacccagaagcccgctagggtttttaaagcccctgttggcagagggaagaactaggttcagggtatggggtggcaccagctaatctgcaagtgggtctcaagtagatccagatgtggggaggaacagaggagaagcaagaaatcaggcaagtcctgacatcagcaacaactagtcgattgatgctttttttttttttagctttgcaacagtttccctgaaattgtgcagacagtcttaaacctgtcaattctggaggctcctgatttatatatgaacactgcactgtcattctccaagtgcaaaactacaaaatgcaatgtttctttctctttatagctatccattcttccatgaccttgagtttaatgacagctgcttctctagtttttccagttattagggaccttctccatgagcattagcaattctagaaattaggtaacactccctggcctatgacttgcacctgtgacccatgacagaggcagaattcatctattgcagagtcagcacatatggaaaaatagatgaagtcactgccttatccatgtccatggcagacattattaatcaatcacagcactctttgtaatttggcctagaaaatcttcacaattatgctccaaatctaatcaatggattagatttagcacatgataaaacttactgaccagtgaagcctagtggtttacctttcaataaatcactgaattaaaaataaagctaataatggcagttttaaattgactttctggttaattgtacaaataaatgcctaagtacattggaatctggacagaataagaaaagcaaaaacaaattttaaaaatcctcattatagaagaaggaataaggaactctgaattcttttattagctatctgacttaattcagctatgtgagcttctactatatgtcaagctgtattctaagaactttacatgttatctcatttaatactcataaaatattaaatagatattttcattgatttttttaaaaaataaagaatagaatattaaagaggctaaataactccataaagatcatgcaaggtcatcagagatagcaatgagatttaaatccagtccacctaattttgcaaccagtgcccttaacctctacattctatactgtctaaccagatatataaaggccaaaagaaaaagaaaaaagctaagttggcaaacaatgggcatgccctagattcagaatattcttaaggtgataggagttgctaagacagcagcagttctttcaaggcttcacatcagtctgcccccttggggaccaaagagaatcaggagccatggcagtgcaggacaatcatgctccacaatcccaatggattgggacatcggaaaatttccctttgggaaattctgttccagcagttaactaggacatgaaataaagactacgtgggcacatggcccatgattttctctgctctatcaggttgactgacttaacagaatctctcttctctctagaggcacatgcatagccccaacagatgcccttgccatgcaagggaggatgaactatgacagtcaatgtcaacccatcaattacaatgtagggatcaatcctaaaggtcttgtcattcctgaagtctgttgtagccaccacctctcatttccttggcttatgagtagttccaagggagacgggagcgcagctgggagctggaggaccccactcctgttcaaatagcaattaaacccctcaaatcttctcttgcagaaagaaaattgtggccactctagcatgagcttcctcaacttgtctccatctctgtttttctctattatcacttttttcttccttttttgtgctttcagaagagaagcatctccgtattgaccaatgctgctgctgctgcttctggtgctctcttctgcagtttccctgggacattgctccattgattctctcctccctatcttaaagagaagagagataacccaggcagtcaaaattttcctatagcctgtaaaacattctttcctttgagcctgctaccctgctattgcctgatctctttcttttctcactctccaccaacattcttgcaaaagtaatgtgcacccaccagcctctacttaatcaccaccactcactctattacccccagaatagcacatctgtcaccacaactccaagagaaatgacttctttttggtcaaccacatggatatttgtatcagattgtgcagagaagacttccgtttataaatgaaagaaactaagtcaccctattcaagactaaagggggaagggagtgtttgtttactgcttcacatgcccaaaccttgaaaagggcaggaatggacctggccagagaacatcatcaggatgctctgtgtgactgcccatctgtctctcatttctatcgttgtgtgccaacagggaaatggggccatagaccattctggtctcacgtttttcattgtgttccccagtttgttgggaaaatccaaagaaaggaatcaattggcctgccttgatttgtatagccacttcttgaaccatttactgtggccagaggaaagccatggcagttggatcagcctaggtcctgcgtctacaaggctagctagaaatgggcagcattctggtattagaagcagctggggaaccacatacatgcctgctggggaaatcataaactctacagccaccatgatttatgtctactaaacagacttatgtgtacagttgagtattgtgcagaataaaataatagatggtggaatggtggtcatcatcaaaatcacacagttatgaaggctgagcaaaactattaagatatatttgcaattctagccaaacatgtatttaagatcttatgtcaagtagacctaatgcatctatgggatctgagctctttgacctgaagggacatccagtagggccagatgtcccaaaatatgagctccacctgcctgctgcttttttgcctctggaaaccccttttagtttcaaattttcacaattcaagtgcaaacccctatgagagggctcctgtcatagttacaaattaacagccctggaaagagtagttcacagacaaatctgaacaaaaagaccctgcagcaacagaaccagaaaactcctgggaattttgggacagtggaaaaaggaagtggagctgcaggagcaacaagtctttcccagcttgaatttagcagacagtaatatcatatgtcaggagagtgctctgacattttctaaacattattatccccctcgaaagaagaaaacagtgaggctgagaaagatttgttaaggactcgtcttgtgtcaggtgaactaaatactgcccaggatttagctcaaccccattgtgcagatgagaaaactaaaactccaagaacctgaccacatttacacagctgcatagtggcaggtttggaattctcacacagatctatttacctggctccaaaagactgcagatggggcagtgaataaatacgataattggtttcagaaagtaggttttttgacttccaagttagtgctctttctgaggagtataccacctttcttatttaaaccataatgttgaacaaagcatttccacaagagcaatgtccttttttctctttacatctgcgaggcaggcaggaggtggatgattttccctactcaacagctaaagggaccaaggctctgatgataaacttagcccagtcaggatgtcattctaaacccagcagggctgggagccctgcaggcactttgcttttgctttctgtaatcaccttcccccgagttcagccaatcctggaaccagggccaggctggctgtgtttgagtgagctcatctctccacgttttttagcttcaattcctcataactgttttacattctgagccttgctcttattttcagtctttcatgaagaaaagttgttacattagaattgagtgactgtctgcctcgttcctcatctcgaattgtatttttacattatcaagtaaattaaaagccatacattacagaaactcatttaaaattctgtttagtgcatatttgcagaacttttgctgattcaatgaatgcctcacttaccaatcatgtgtaaatcagcgttttgctgtggggaatactttagggccggctgaactgacagcatccagttggtactttctcaagtttcaggttatctctagccctccacacctgagcctgggaataagggggagctgagcccaggaaggcagtgtgacttctggggcatgtgcccacgacttcacacctcaagaagaagggggagatggcgcattctcggtagtggcagcatctctggcagaatcatcactattatagtaacactaccaatagccaaaactggcttcctgggcacactacctgtgcagtcatgaaaagcacagtgatgaaagggccccgtgcttagtttaattatctgctattgccaaatgaaatgcttgatcattttttagcaaaagtctctcattttcatttttgcagtacacatcacacagtcaattttgttgacagctgtcacttagtgaagatttttctctaagttagaccttgagcttctcttgcatcatctaatttaatacttacaatattcagttattcaacaaatattgagccactcattaggtaccaagcactgtgctaagccccagggatgctagaataaacaagacaggcgtggtctctaccttcatggaacttacattcaaacagtataatcaaaaataaatcaaaattgtaataactgttctcaaggaaaaaacaataataaaagaccaaggtaaatatattagaaagggttcatttaaaataaagtgacaaggaagggcatttctgagagcctaagaggtaacaattcttgtacccattttacagataaagaaactgaatctcagataggttaggtgacttagccaaagtcatagagccagataatggcactggcaagctctgaaatcaagtctttctgacccaggggccagtgtgttataaaaaatcttttcaaacttcaaataatagtaatcactggggattgtattaaactatagattctgattcttggatggtgctgatattgctgggcccagaaccccactctgagtacaaggccctaatccctgtgttagtggacatggttgggtggctgcagacagaactccagggcactaagccctggaaaggtggttcttgccatcagaagtggtagggctcagtaccagaggggcagagtgggaactcaagggctgcaactcctggaagatttcatgaatttgcaaaaaccctggggaaaagaatgcaaagatcatcctaacagttctgaccaagaactttgaagagggctcacctacaagagaaggagttttgcccccactctacagatccaaaagcctaggtatatcaccttgagtgctaagaaatgtttctttcttatgtccaactacaatctctcttattgtatcttaagctcattttcttttgcaaatttctttaggaagaaagaacacaagcagttagcatttccacatattgaagttagtttcaagtcatctcttatgtttctaagtccaaatctaaatacctcattgcattttatttttgtctttataggagtatgggagtcattttttaaaatctctacaataatcttttttctgattcttctgcagtttttatgagccaaatatgacattatgagatctgactaattcatagcaaaaataaccacttcccagccctcataaaacacacttcttttttccccacaatgtattaaacttatggtcaactatgaatgccaggtctctttctactgtttatgtatatgttgagtctctgttctctgtgtttgtcttttttgttaagtactgaaacaatggcaattgacacagtagctggcgcgtagtagatgattaataaatatcagtgaaataaacgtataaataatcttgaactagtttttgctgaattataacctgtttttaaagtgtatttctgtgctcaaatcattaggaacctccctgaagggggaagtgacctcacttagagcaaagacatgagtgtagaattgcctggaggcatctaataaatatttttcatgagtgatggttgaccaaagaaagagcagagtctgtaattttcgagatgatatagagaaaagaaggactaagaaagactattggactgggaatcaaccagcaaaacttctagcattcgccataccccaaattagctgtgtgaccttgaggaattcattagacttctctgggctacaggtatcctagccaagatacaatgggtggaatgagatgatcgatctctaagtttctctttagcactaacaatctgtggatccatatgaacacttgtatcagggtttagaaaatagaaaccagttgccaaaagacaaagatttgtttagaaatgcaagttatctgtcagaggatccttggacaaaaacagctcttgctttctcctttggagtcatattttccacccttgtggcttattgcaatggtctttaatgcatgcagttttctctgtgacccctttcagtttgtcatgcctagctagatttgtgtggtgcctcatcacaccatttggctctgcgtctgcccgtgtttggttgcaaagttcacagtactcctcgtggtgtgcttgatttgccctcgaaactcccattgactttgtgtactcattgcctgatcaggcccatttaatctgcacaactattcaacacaaagatggataattaaacattctatggatttcagtctcattctccaagatgtaaggggtttcctggcagtactgtctgcctgaatcccttggagcttcctgagagctctcccttcataacctacagataaatcactcttcttccccagaaacacagccactttctcttttctaagggcatctacttcatttgtacctgggccatggttaggatatttcaggtaatttcagctccaggagggcagcactgcaatatcagttggcctccatttacctctgttccttcctgcctgccctctactgagggcctatttttgccagaaaattttgtttttgtttgtttccaatccaatacacaagcttcccacaggtacctaatgtgccatctgcattttagcaaatattatctcctcattcagcctgaatcaagggcttttctcttacatctggaatttgtaggtatgctgtgtgcattggcagagctaaccatgagtggaaacaaaacagcatctgtgaaatgggataatatagggacagaggccaaggaactttgaagtaagcaaaagagaaaactccagctgtgtttaagggaaagttaatcaaagcaacatgtgttgtgtattttagacctactatgtgcctagcaatgtgctgaatgcttttaattatgccaactactcatctcaatgtctccatatagtattagtttcaacttagaagaagtaaggctaggagagaaaaaaataactttctcaaagtcaagcaactaataagtgggttcaaatctaggctttcttttttttaatttgtgtaactgtattgggtagaactgtaattttgttacatacatagattgtatagtagtgaagtcagtgcttttagggtatccatcactcaaataacatacatcatcattaagtaatctctcatcattcatcgccctcacatcctctcacctttctgaatctctgttgtccattccacagtctatgtccatgtagacatattatttagctctcatttgtaagtgagcacatgcagtagttgttcttctgtgtctgagtggtttcccttaagataatgaccttcagttccatccatgtcgctgcacaagacatgattttaattttctatggctgaatagtattccattgtgcatatgtaacacatattctttatccagtctttcatttatgggcacttaggctgatttttgctgttgtcaatagtgctgtgatcaatttatgggtgcaggtatcttttttatataatgatttcttttcctttcaaacctaggacttcttaactttaaaatttatgttcttttccttttttatcaaaccgctatgagagggaagagtaaatgtgaggacaagtgcaggagaggagagggagatacaggaaaggaaaggatgtaggtacattcacagctgcctcaagtggcactcagagtgtgtcatccatgccagtgatctgtcatcaataccagaaactacatacactttacaatttggttccagcacaacaaaagtcaatacatataactctcttctgaatctttcatcatcaggcttcttactggggaattctccaagtgtgcacaagtgtccacatatccccatgacctactttgtagttcatgtttggggtgcaggccacccattcttagtttctagcctttcccacccatgtatacgcactgtgatctctgactgtaagcgagcatgctaaaaatgtagtagcctacaacaacatcatcactttgttattacctctcatggttctgagggataactgggcttagctggatggttcttgctcagggtctctcatgtggctgcaaccagacagtgacctatactgaagacatctcgaaggcttcttcatttgcatgtgtggtggttggttctgtcatttaatggctcatttgtgtcctctccatgtgactggagctttctcacagcacaaggctgggttctaagagaagcagcttgacagatcctctggaagctgggtcaacttttaggccttggatgtctcacagtatcactttgccatacccatagctctgtctagattcaaggagagggaacatagacctcacttcttgatgaaaggagcgtcactgtcacatagtaagaggagtgtgtgcaatggatcttatgatgaccatcttggaaactctattttgccagaatcctcccattttatttctctcccatatgtgacatatactcatcttttctcccaagaccaccgtatcccataccattacagcatcatctcaaagtcaggatctcatgcactaagtaagatatgctgtgggtgaagctccttggattcctctccttgactaccgtttctgtatctgaagatgtatgaactaaagagacaagttatctgcctcctaaagacatcactttttaaacattcactctgtattgggccctgaatctggcatttagatgagttacttatcaacagtcctgagaagtaagtaatattatccctaattccaggcatatcaaagtaagtacccaagaacttgtagctactgagagtctttagctccccaatgaggctagatgaacacacattatgcaagacaaattataaataccttaccatgcagttaacttatattcagtagtattcatttatattcagtagtaattctgaaagtgtccatagaccacaaggagtccctgaaatattttcaggaaactcaagaggttaaaatggttttcataataatattaagactttacatgcctttttcacttgacatttgcactgatggtgcaaaagcatgagagttaaaaggaaccaggccttctcaaagaaatagctgagccagggactggagcaaagtcagtacaaagatgagccagcaacaatttattaggccagaaagtgagaaagtattcaaggaaaaaaaataatgattgggacacatcacagacataggatacagcttggaaggctcctcctggccagatctgggacaattttaggacaaaaataagtaagttctgggaaataatataaacaattgaaaaaaacacaaattcatgagtttaggccaataaaagatagctaaatagatgatagaaagatcataggagaagaacagagggctcttgcttacagtagaatgctaaggctaattggcacacatggaggggatgctgaaactggagaatcatcattttgcaatctccatagttgcaatctccaaagattggatcaggcaagaaccatcattggatgctaaatctagaagaagatttttatgagaagctgaatttgcatggtcttgaaggatctcaccacacactacttattgtggtaaaagagaaaaataaaataaatttaaaattaaaagagtggaaaattaaagactggaaaactcgaaccatgccttgaataatgataacagttaatgttactaatgaaaggcatatggtgatcgtgtgacttcacatgtggcttctgagaaagacactcatgcagtattctggcataggatgcataatgtgaacctaatcacaatgcaccatcagaaaaacacaaaatgaaggatgctctgtttttttctttttataagtggatacatggaggaaggtggcctctactcttaaaaaagtgtcataaaaaaaaggttgtggaaatgtttcagataaaaggaggctgaaaagacaagagaactaaatgcaatactacctgatactggatcttgtacctgtaaattatcacattaggtcaacagacaatactggaatacagacaataaaaatgttatcaatgtaactttataaagttgataactctactgtggttattgaagagaaaattcctcctcttagcaaacaaatattgaaatatttaagggtaaatagccatgatgtatgtaacttaacttcatgattcaggggaagaaaagaggtggggaaagagggtaagtgataaggcaaatggggaaaaattttaaactggtaaatcaaaataaagagtatctgggtgttccttgaattatttttatttttgaaaatttttaagttaaatatgtctccaaacagaaaatttaaaataacaaaagcaatggtggagcaaagcactggtgttttgaacaaattgaggcagtgcccccaaatggtagtaggtgttgtggtgtgttcttcaccaccacatactcacaatttaaaaaagaaagaagaaagaaagagagaaagaaagaaagaaagaaaggaaggaaggaaggaaggaaggaaggatggaaggaaggaaggaaggaaggaaggaaggaaagaaagaaagaaagaaagaaagaaagaaagaaagaaagaaagaaaggaaagaagaaagaaaggaaggaaggagaaagaaagaaagaaagaaagaaaaagaaagaaagaaagaaagaaagaaagaaagaaagaaagaagaatctggtttaatgtttaaatgttatggatgaaataataagaattattaactttattgtgctctgtgccctgagtacacgtcattttaatattgggaagactcaaatattgggaaatgggaagtatacataaagcactcctgctgtgtgctgaagtgtgatgttgtctcaaggaaacgcaggaaggtgtgcacgtgcttgagggctgagctgcagtcgctgcttctgtccatggaattccattttgagttgaaaggacaattggcaggcaaactacagttattcagacaaatgatggttatcaagcagacactctctcaaatatgaaggaaatgagcctgtcacttcaaggaaaacaactgacaagattttttgctaataataaactttgaggaggtttcatgtgataattagaaaacttagtatctgacactatgacacttgacagcttcccaatatttaaatatgtttctgatgagactggtagtgatattaagtactatgattttgtatattgtaaatgaaatgggtcaatatttggaagatctgcattactcagtgaaccagtattttctgaatgatcaacgcatgatgatacaaaattgtgcctgggcaagcctcattcaaagtgtaagaaatactaatggattttaatgtaactgagtataaaaagtttattaataaggtttcacagttttaagaaactactacttattgagttttggtatagtatcaagaaagaatctccataattatctgaaaggctattaaaatactccttcccttttctaccacacatctgtgtgaggcaagctttttttcgtatactttaaccaaaataaaatatcacagcaaagtaaatccaaaagcagatatgagaatttctatgttttctattaagccagacattaagagatttgcaaaaacagaaaacaacttttgctcttctcactaatgttttttattttggaaaatacagtaattttcgtttttaaaatatatcatttatgttcatatgaatgagtatactgttgttacttatagatgaattaataaataaatatatttaaaatgttaatttttaatatctaacatggaatctacaaaaaaaaaagctctttgggatcctcaataattaagagtataaaggggtcctgacatcattttgtgttcttaatggaaagggtggtaaactcaggtgcctgtgctcctattatggcagctgaagccgtactgggatgctgcctctacaggtgcttgcgttaaccacacagtacagtcaagggcaggcatgtgacctaagcttggccaattggactttttcttctggcattttagttattgaatgaaatgaaactacagtagaagatatagtgtatgttcattcattctagtttttgagaccatatggaggttcctcgtttctctctgttacaagcccagtttcttcagttttcctgtcattctagcaggacaatacatctctccacactcatcaccccccgcatctccatattttagccaccataggattctgttgcctgctaccaaaaaatcttaataatacattaaatctcttactttaccctggaaatgacttctccttgaatttccttcatgctgcaattctgctctttaccttgagtgtctcatgtcctgattcggaaagctttttgctcctgcctgtgggtgacacccaagagttatagcctactcattctagtcaatccattaatagctggaattcaggcttaaaacaactcacattggtaagaaacatggcttctaagacaatttttgtttctcatgaataaatttcactttgtctagaggagcccaggaaatttcctgtttagccaattaaagcccattttgtttgtttgtttttaagtaggtgaagatatttagagatctaataggccctgtagaaataatttattatgtttttttgtcgtggttattgttatatgataaatgaagaatcaaagggacctcctggtgataaaaatgccagatttggaatcagaaaaccagaattacagctgtaaccttttttaaaaaatgtattttctgcttatgtatatagctatacctttttttttttttttgaaatggagcctggctctgttgcccaggctggactgcagtggtacaatcttggctcactgcaagctccgcctcccgggttcatgccgttctcctgcctcagcctcccgagtagctgggactacgggctcctgccaccacgcccagctatttttttttgtatttttagtagaggcagggtttcattgtgtgttagccaggatggtcttgatctcctgacctcatgatctgcccgcctcagcctcccaagtatatagctataactttttaactcacctaaaggtatgtccttgagcaaggactagatgatctcatcaggcccttccaattctagagttatgtaatttaaagttcagcaaagcttcaccaactatcacttcctactctatccctccctagacaagaattgacgcctacctttcctgagcagtgctgttggcaggtaatagcacaggctctggatgcaagtagacaagtgcccaaacctgggctaagtgacctcacctcatctgaaaaatgggaatgatgatattaaggtattgttttgtggattaatgaggtaatgtgcataacacatttagcacaaagcctgtaatagaacaaatgcttggtgaaagcaagccacaatgctattatagctatagctgaacacacttttcacagattatagtcatcccgccactaaatacattttgcagacagcttgctatttcttcttctgtaattctaaatgtgttttacctacaactcagtaggagttaggctaaatttatcgctttgcatggaatcagcaaaaactgtaatagggtatactgtcagtgagtaatggcatatatttgtaaaggatcagtgtttcctgcaaaggagaggaaggattcagcaccccatctagaagagctcctttgctgctgaaattgaatctgtatgctgctcttcagtgtattactttactgtgaggtgactcaggagataagacaacagagcattgtgggcaaatagatcacattcagaagaagctgcctcttagcacttgtttttcttgtgccctgctatatcccttttatggcctgaattgtgtttacccaaaactcatatgttaaaggtctttaggatgattccctaatccaatatgatgtccctgggagaagaagaaatctggacacagacgtacatgagcagagggaaggccatgtaaaaacacagaaaaaaagatggtcatcagaagccaaggagagaggcctcagaataaaccaaccctgctgacacctggattttggacttccactctctagagctgtgagaaaataaatttctgttgtttaagccacccagtctgtgctgttttttatggcagcttgggcaaactaatacaatctccaaggcctaaaaaagtgtctggcacacagtaggtattcaataaatacttgttggatgactacaagaagaaatggagcagttggcagctgacacccagttttaatgaaagcaagtctcagttcacacagtacaaaataagtcatttactgacaggtggctgaaaacagtcacacaagcatgtctggaaactcagaggactctgagttctctgtcctttttgaaactcagaagatgctttggacaaaaggtcagtggggcaaaggcaaaaatatgccagcagcagaatttgcctaacatccattggactgaggactagggccatttaggaatcaagaattaaaaaaaaaaaaaaaaaaaaaagaagcagctgctgcttctcacctctgaagcagaagatgcaaattatatagctatgtcactgagtcctggctaacagagaaacctctcaacctgtttagaagaatccacggccattagtggaaatattagtacatcagagaggttaactttgatgatccccaagcagcacttgtaaaattccatagtttacaaacttctccattccttttcatttttctctgaggttattgtggtaaagcaatctgcttaaggtctcaaattagtcagtggctgtatcaattaagctgatttcagagacaagtaacaattcaacagctgtaaacaattaggaaatttactgattcacataactgcaagtccaggagtggtatgtaattcaagattttttaatctagaagctccatagtgtgctccagagttcagattccctctgacattcacagttttagtattgccctaaaaacagctcccttaatggtcatagaatggaggctttttctttcacactcagtagatgagatggtttggctgcatcctcacccaaatctcatcttgaattgtagctcccataattcccatgtgttgtgggagggacccagtgggaaataattgaatcatgggggtgggtctttcacatgctgttctcatgatagtgagtaagtctcatgagatctgacggttttataaaggggagttcccctgcacaggctctcttgcctgctgccatgtaagacgtgacttttcttctccttcaccctccaccatgatcgtgaggcctctctccagccatgtgaaactgtgagtccattaaacctctttcctttataaattacccagtctcgggtatgtctttattagcagtgtgagaatagactaatacagtagacaaagagaatcacttaaagaagttgtacctgaagggtgagcaagaactttctcagaatccctcagtcagatcccttcttatttgtcagtggtccaatttggattcacatgtccatcaaggaaccaatcattgccaaagcagggagaagattgtcttaagtcaatcaggcacactcctgaacaacaaaaaaaatatggctcccttaaggaggaaggcaaaacatatgtgagataggaaatcagcattgtctaccatggtggttcaactgaaacatgagccaggtccttcctgtctaccatgtcatttcttatctgaaaaatctttacaacttacaagtaattgacaaaatggttaatcacgttgttaaatagctgttttcctcgcaaaaggacagtaagttttctttaaatagtgaagttcttactagtaattaaaagaggctacaatattgaaggttctgattttcctatgatttcgataataagttactaacattaagccatgtcctcctgtgtgaaaatcatcccctccctcgttccaactttcaggacattaaatgtaactgggactactccaggaacactaaaagccactgctttattacaaacggtattttgctgctcattaaagtaggtacatcacacttaatgaaagctcagtaagttataagcaagcattctcaagagtaagtcatcatgactgccaacctggtgctttcagctgtggagcatcccctagggactaggtggagaagtgccggggaagctggagctcctacctacagatgtcttggcactggaggctgctttctttgagcctagccttccaggcaattgatcctgatcctttggctcagagaatcattatcgtttttagctttgcagcaggagaccaatagagacaaatgaagaaattagaaccatactcaggcttcaccaaatcttatggcagagcccagaaaagcccactgggattgctccatagagacaccacagcacttaagcactgacagtatcaggttagactagaaagcgtgggcttccacagggcagaggaaaatggcccaggaagaaggggtgaagcctccctcaaagacaaagcgtgctataagggatcccaaatccaatcaagaacctaaatcccaactccatcctcaatgcagtttctccccctcaattcttttattttgttaatgtcttcatcatctgtcagatactcaagcttgaagcttcacggttacatgtgacttcttctcccttatcccccatttctgatcagctgtcaagagctgtcagttctatctcctttactccttttctttctgcctcttcctctccattctatttgctgtcagcctaattcagaccctcattaactcttgttggattattaacatggcttcatcactggcctattcatctcctgcccctatgctgtccaaccactctattaattgctgaattgattttctttttttttttttttgagatggagtctcgctctgtcgcccaggctggagtgcagtggtgctaactcggctcactgcaagctcgcctcccgggttcatgccattctcctgcctcagcctcccgagtagctgggactacaggcgctcgccaccatgccccactaattttttgtatttttagtagaaacggggtttcactgttttagcctggatggtctcgatctcctgaccttgtgatctgcctgcctcggcctcccaaagtgcagggattacaaggcatgagccactgcgcccggcccgctgaattgattttcataaagcacagctccaattctgtcacttccctgcttactgaaaaactttaaaagtccactttccctacaaaaacacatcacaatccctgtcttagatttaagaacttttgtgttctgatttccccagccttatcttctaactctcccctgaatattctcattctcacaagacttctcaaaattccccatatataccccacgtttccctctctgattcctatccaagagttactctgtacctggaatccctcaaatctccatttccacctaccatttatcctcttagatccagctgttatgttatggccttggaggacatattcaccagttgtgatctatccatcttctgaaaatccagtaagtattacctttctgctgttgcacaaacatctctatttttcaattataaaccatagctttcccactgtattcaactcattttatccattaattatacaaatatttattgagtggggtattattactgctacaggcactagagacatcataatggatgtacaaaacagaccaaaacccccactatcttagagcttacattttattagaggagaaaacaataagattaagaagaaaaatctgtaatatattaggtagtggtgagtacaatagagaaaagaaaaatctgagaaagggaaaggaagtgttagctcaaggggtttgacattttagatgcagtggtcaggaaagcactcattgaaaagatgacttgaagtgaaattctgaaagaagtgagagagccaaccatgcagatatcttgaggtaagagtactcaaggcaagggaaacagaaaatgtgaaggctttggagcagaagcttgcctggtgtgctcaaagaacaggaatgggacctgcatggaatgaacataacagagtgtccctggatgtaaagattgtaattaaagacaatgatggacatagagtagaatatccccaaaagcagacataaaatagtatctattgaaatattgaacattttaaatatatttctgtgcttttatgttgatatggtttgggtttatgtccctgcccatatcccatttcaaattgtaatccccaatgttggacaagaggactggtgggaggtgattggatcatggaggacaaatttcccccttgctgttcttgtgatagtgggtgcgttctcataagatctggttgtttaaaagtgtgtagcacctcccccttctctctcttccttctgctccagacatataggacatgcctgcttcccttgcaccttctgccatgattgtgagtttcctgaggcctcctcagccatgcttcctgtgcacactgaggaaccacaagccaattaaacctcttttctttataaattatgcaatctcaggtagttctttatatcagtgcaagaatgaactaacacagaaaagtggtaccaagagtagggtacctgaaaatgtggaagaaactttggaactgggtaatgggcagaggttggaagagtgtggagggctcagaagaagacaggaggatgagggaaggtttggaacttcctggagacttgttaaattgttgtggccaaaatgctgatagcgatatggacaatgaagtccaggctgatgaggtctcagatggaggtgaggaactcattgagaactagagcaaaggtcacttttgttaagcattagcaaagagatttcagccgttatgcccatgccctagagatctgtggaattttgaacttgagagagatgacttagggtatctggtgggagaaatttctaagcagcaaagtgttcaagacatggcctggctgcttctaacagtgtatgcttatatgtgtgagaaaagagatgatctaaaactggacttatatttaaatggaaagtagaacatgaaagtttggaaaatttgcagcccagccatatggtagaatattaaaaacccattttctggcgaggaattcaagctggctgcagaaatttgcacaagcaaagaggagccaaatgttaatagccaagataatggggaaaattccttgaaaattacaaagaccttcactgcaggccctcccatcacaggcctggaggcctagtagggaagaatggttctgtgggccaggccctgctgccctgctgccctgcacaacctagggacactgatccctgcaacccagccactccagctccagccatagataaaagggcctaagatacaccttaggccattgctccagatggtgctagttgtaagccttggtggcttccacatggtgtttagcctgcaggtgcacagagggcaagagttcaggtttgggagcctctgcctagatttcagaggaatgtatggaaatgcctggatgtccaggcagaagtctgctgcaggggtggagtcctcatgaagaccctctattatggcagtgcagaggggaaatgtggggttggagcccccacatggtgtccccactggggcactgcctagtagagctttgagaagagggccaccatcctccagaccccagagtggtatatccactgacagctttgcaccatggaaaagttttaggcactcaatgccagcccttgaggtcagccatgggagctgagccctgcaaagccacaatggtggagctgcacaagacattggtaggccaccccttgcaacagtgtggcctggatgtgagatatggagtcaaaggagattattttggaattttaagatttaatggctgccctgctgggtttcaaacttgtgtggggcctgtagcccttttgttttggctgatttctccctttcagaatggcagtatttagccagtgcctatactctcattgtatcttgaaagtaattaacttgtttttttttttttattttacaggctcattggcagaagggacttgccttatctgagattagactttggattatggacttttgagttaatgctgaaattagttaaaggacatgagatctggaaggatacagggcagaatgatatgatttggatttgtgtccctccccaatctcatgtcaaattctaattcccagtgttagacaaggggccttgtgggaggtgattggatcataggggtagacctcccatttgcagttctcaggatagtgagtgagttctcatgagatctagttgtttaaaagtgcgtagcacctcccccttctttctcttcctcctgctccagaaacgtaggatgttcctgcttccccttcaacttctgccatgattgtaagtttcctgaagcctcgccagccatgcttcctgtacaacttgaggaactgttagccaattaaacctctgttctttagaaattagccagtctcaggtagttctttctaacaatgcaagaatggactaatacacatggttacaaacagagtcattttttttctacttaagaattctcattccttcttttcatgcaggcttactagaaattgactttcacagtgtttgtttgaaaatgtctttatttcatcttcacttgtgaaagataatttttcagggtaaagcattctatgttggcatcattttgctttcagaaatgtaaatattctttccattgttttttgtcttctatgtttcctgttttcctgttcagaaatcaactatctaattagagcaaagtttatagtttgatccttttgggcttggttgtttttcaaattttcttttccttggttttcagcaggcttattttgaagcatctcaatgtgcttttcttgcatttgttttgcttggaattcatatggatttgtgtatgtatggtttgatatcattaatcaatttggggaaattctcaatgattttctattcatatattgtttgtccattttttttcttttaaaactataaatctacatatgtttggtacttttattgcctcataaattgtttatgcccactctttctttctttctctttctttccttctttctctttctttcttgccttctttttcttttctctttctctttcttttctttttctttctctctctctcttccttccttcatctttgctttcttccttccttctttctttcctttcctcttttctccttctttcctttctatcttttttgtttatttctctctatgcttaatctggacttttctactttagattttccagtttagtaataacctcttcagctatgttcaatctgttacagtttccatttaattctttgttttttaaatagatctcagatttggtgaaagttcccatattgtcatctatttcctttaacatattaatcacagttactttaaagcttatgtctgactaactccaattttgtatcacctgtagttttgttcctatgatttatttttctctttgtcttatttttgatagaaattatactttttgattgaatgctggatattatatatgaaaaactataagcacttccattcatgttattttcctccagagaagattcactcaatcatatatggcagatagcgaaaataggacatgtctccattaactattgctgcgtaacaacattacccagagttaattgcattaaaaaaaaatcataatcccagcactttgggaggccgaggcaggaggatcacttgaacccaggagttcaagaccagcctgggcaatgtagtgaaaccccatctctacaaaacatgcaaatattagctgggagtggtggcgtatgcctgtagttccagctacttcgggggctgaagtgagaggatcacttgagtccaggctgtcaaggctgcagtgagccaagattgtgccactgcactccagcctgggcaacaagagtgaaactctgtctcaaaaacaaaacaaaactaagcacttatcaagcttgtgattctgtgggttaggaattcaggcaggatccagcagggatacctcagctctgctccatgttgtctatagtcacagctggggtgattcaaatggctgaagacaattgggacaacttaaataaagccctatgtatggagcctctgtttttgtccacatggtgtctcctgtggagctagctcctttactcacatatttattccctgggctgggatggctggaacagatgagagttggctagactcactttcaacacattgtggtcttaaggtagtatgacttcttcatgacaagtggcttcccacagagtgggcatgtcagtagagaactttccaaaaggcctaagtgaaagcagcaacgcttcttatagtcttagtctcagaaatcacacaaggtcactttcagggcatatttatacatatggcagattcggggaatgaacatcaaaagaggaaaaaacatagtgaagtagatcatgtcattctaattaacaaattcaaggtggcatttcagactttgaaagtttaggcaatttctgtttgcctccagtcctagagttagcccttcaggggtcacgactgagtccaaggtacttagaacttttcttcctttgtggctgttagattaccatttgtgtctccttactactggaaagctgatgaaactccttttgacttttatcctatgacttttactcaaaatctaggacattttcccttctctccaaaatcttcttcccagaatcttgatttctcaagtcatgtctgcttttgttgtcacaaatctaatttttatctcttcagcatcatgagattcccaagggctctgctggattctctgtctcttgtgtcatttctctgttcagcttctcagccactcatctaacaaagcttatcaataggcaaataccccatggataaattaggggacagaacattgtgcttgcctcattaagttcccttttcctctcaatacgtgcctcaagttctgcataccttgaaagcttccccacttatacaaacatattttttgtgcctttctaattgttcttgacagtaggtttggtctactacaagtgacaccaccatcatcagaagtagaagtccatagccttttatttgaatgattttcactggctcaccactcacaatagctcatgtactgtttctgattatcatattctctaactttgtgacgtattttcaccatatggaatcttcttgtttttttttacccagctttcatggggatgatgatatccctgatcccccaggaccataatgtcccttgtccttgatgcagacactgtctatatttcttttagattcccccaaataaatacccactcagaagatatctagtcacaagcctttggttaaactagagctagaccttttttttttttttttttttttttctgagacagagtcttgctctgtcgcccaggctggagtgcagtagctcaatctcagctcactgcaaactccatctcccggactgttcaagcaattccctgcctcagcctccccagtagcttggcaccacgcccagctaatttttgtatttttagtacagactaggattccccatcttggccaggatgatcttgaacttctgacctcgcaatccacccgcctgggattacaggcgtgagccactgctgggattacacgcatgagccactgcgcccggccaagctagactttaatagcttaccctagtctatacagcagaaccagggtataagccacatcatgtctttcacatcccacttatggtagaataatatactgaaacatgttccagacctatttacaaagctgttgtgtgttctcatactctgattcataatgtattacatgactttaaggttgctgctttgcatacccattaccaaaatagaaaaaatctaacttaataataataaatcggtttttaaaaaataccatctatactcattccttcttccctccagagtacagtaatttttacagcaggctgctaaatatatcaagggataaaccaccactcatctggtggtataaagaagaaagtgaatattaaaaacaaaaatggcaaaaagggcctcagcttcctgcttcacctgttagttttctttcctgagcactgagcttgccaagattgatgtcagatgcagcctcaaactcccctgcattaacagaaagcattaggttctcaggtgagaaagtttttctttagtgacaactcttgcagacaaatccagttaatatgcctgtgtgtgcatgtgcacatgcacacatattcatgtatactaacagcttgatagatgagaaatggctttctgatgatttttaaatcaatttttatagtttaagggctttttttccagaagaggagaaaactttatttaggtagtcaagtgtttgaacttgctgacaggcacttcgcaaataatttttgagtgaataaatgaatgtgaataattgaatgactagtggactcttgcattccttcttcaataaaaaccaaaagcaaagcaaagcaaaacacaacaaacaaacacagaaatccagttctcctaagactagcacaaaaggagatctgctacttggggagcatgataaggtagactatccattttaactttctgctctagatttctcacagcacaggaaaaacaagggcctgtatgttaaaaagttattttactaaagttgggggataacaaaaagaaaaacaaaagaagcatgagatcatctattctgtttggcaagacacaatgttctctgtgttcaaaaattgagttcttaagaatcacaataaaatgatacaggagctgacagataaaatagcctgtataaaaaagaacctaacaaaactgacagaactgaaaaacacactacaagaatttcacaatgcaatcacaggtattaacagtagaacagaccaagctgaagaaagaatcttggaacttgaagactgactctaaaataagggagtcagaaaaaaataaagaaaaaagaatggaaaggaatgaacaaaacttcaagaaatatgggattatataaaaatgtcaaatcaacaaatcactggaatccctgaaaggaacagggaaaaaccaaacaacctggaaaatatatttcagtatatcatctgtgaaaacttccccaacctcactggagtggccaacagtcaaattcaggaaatccagagaacccctgcaacattctatacaagaagatcatccccaagacacaaattcatcagattttccaaggtcaaaatgaaagaaaggatgttaaaggtaaccagagagaatgcacagtggtcacctacaaacagaatcccatcaggctaagagcagacctctcagcagggaccctacaagccagaagagatgggggatctatattcaacattcaagaaaaaaaaatctttaaccaagaatttcatatctagccaaactaagcttccttagcaaaggtggaataagattcttttcagataagcaaatgctgggggagttcattaaccccacacccaccttacaagagatcttgaaaggagcactaaatatggaaaggaaagatcattaacagccaatacaaaaacacatttaagtatacagagcagtgatactataaagcaaccacacagtaataaccagctaacaacacaatgacagtataaaattctcacatatcaatgctaactttgcaaatatgttaaatgccccattaaaaagacataaagtggcaagctggataaagaagcaagattgaatggtatgctgtcttcaagagatccatcttacaagcaatgacagccataggctcaaaataaatggatgaaggaaaatctaccaagcaaatggaaatcagaaaaagcaagggttgcaatcttaatttcagacaaaacagactttaaaccaacaaaggtcaaaaaagacaaggccattacataatggaaaaggttcaattcaatgaaaagaactaactatcctaaacatatatgcaaccaccaaggagcacacagattcataaagcaagttcttaaagacctacaaagagacttagactcccacacaataatagtgagagaattcaaccctccactgacagtattagacaatgttaagcagatcatcaaggcagaaaattaataaagatattctggacctgacatcaacattggatcaaatgtatctgatagatgtctaccaaactctccatgccaaaacaacaaaatatacattcttctcatcaccacatggcacataccctaaaactgaccacacaatcaaacataaaacaatcctcagcaaatgcaaaagaattgaaattatactaagcacactctcagactacagcacaatgaaaatagaagttaagtcttaaaaaaatcactcagaaccatgcaattacatggaaattaaacaacctgctccagaataacttttgggtcgataatgaaattaaggcagaaatcaagaagttctttgaaactaccgagaataaagatacaacataccaaaatctccagaacacagttaaggcagtgttaagagggaaatgtatagcactaaatggctccatcaaaaagttagaaaaagctcaaattaatgacctaatatcacgactaaaagaactagagaagcaagatcaaaccaactccaaagctagcagagcacaagaaaccaccaaaatccacgctgaactgaaggagattgagacacaaaaaaccattcaaaagatcaatgaatccaggatttaattttttgcaaaaaaaaaaaaaaaaaaaagataggccactagctacactaataaagaagaaaagagggaagatccaagtaaactcagttagaaaaggccaagagcatgttaccactgaccccacagaaatacaaacaaccatcagagacaactacaaacacctctatacacacaaactattaatagaaaacctagaagagatagataaattcctggacacgtacaccctcccaaaactgaatcagggaggaattggttccctgaacaggccaataatgagctctgaaattgaatcaataatgaatatcttaccaatcaaaaagagcccagagtcagaaggattcacagctgaattctaccagatgtacaaagaaaagctgttatcattcctactgaaactcttccaaaagaattgaggaagaaggactcctcccctacccattctacgaggccagcatcatcctgataccaaaacctggcagagacacaacaaaaaaataaaacttcaggccaatacaatatccttgatgaacactgatgcaaaactcctcaagaaaatcttgtaaaccaaatccagcagcacctcaaaaagctaacccatcacaatcaagtaggttttattcctgggatgcaaggttggttcaacacacacatatcaataaatgtgattcatcacataaacagaacaaaagacaaaaaacacatgattatctcaatagatgcagaaaagtcttttgataacattcaacatccctttatgttaaaaactcaatagattgggtactaaaggaacatacctcaaaataataagagccatctatgacaaatccaggctgggcacagtggctcatgcctgtaatcccaacacttcgggaggtcaaggcaggcagatcacttgaagagtttgagatcggtatagccaacatggtgaaacccaatctatactgaaaatacaaaaattagccaggtgtgccctctccctctccctctccctctccaggtgtgccctctccctttccctctccctctccctctcccctttgcacggtctccctctgatgccaagccaaggctggactgcactgccgccatctcagctcactgcaacctccctgcctgattctcctgcctcagcctgcccagtgcctgggactgcaggcgcgcgccgccacgcctgactggtttttgtattttttggtgaagacagggtttcgccgtgttggccaggctggtctccagctcctgaccacgagtgatctgcctcgggctcccaaggtgctgggactgcagacggagtctcgctcactcagtgctcaatgttgcccaggctggagtgcagtggcgtgatctcggctcgctacaacctccacctcccagccgcctgccttggcctcccaaagtgccgagattgcagcctcttcccggccgtcatcctgtctaggaagtgatgagcgtctctgcccggctgcccatcgtctgggatgtggggagcgcctctgccccgctgccccatctgggatgtgaggagcgcctctgcccggccgcgaccccgtctgggaactgaggagtgcctctgcccggcggcgaccctgtctgggaactgaggagtgtctctgccccgccgccacccggtctgggaggtgaggagcgtctctgaccagccgccccgtctgagaagtgaggagcccctccgcccggcagccacccagtctgagaagtgaggagcccctctgccccgcagccgcccggcctgggaagtgaggagcgtctccgcccagcagccgccccgtccgggaggtgtacccaacagctcattgagaacgggccatgatgacgatggtggttttgtcgaatagaaaggggggaaatgtggggaaaagaaagagagatcggactgttactgtgtctgtgtggaaagaagtagacataggagactccattttgttctgtactaagaaaaattcttttgccttgggatgctgttaatctataaccttgcccccaaccctgtgctctctgaaacatgtgctgtgtccactaagggttaaatggattaagggcggtgcaagatgtgctttgttaaacagaggcttgaaggcaccatgctcgttaagagtcatcaccactccctaatctcaagtacccagggacacaaacactgcggaaggcggcagggccctctgcctaggaaaaccagagatctttgttcacatgtttatctgctgaccttccctccactatcgtcctatgaccctgccaaatccccctctccgagaaacacccaagaatgatcaataaatactaaaaaaaaaaaaaaaaaaaaaaaaaaatttgccaggtgtgatggtgcaaccctgtaatcccagctagtcgggaggctgaggtaggagaatcacttgaacccaggagctggaggttgtggtgagccatgcactccagcttgggcgacagagtgagactacatcaaaaaaaaaaaaaaattctgaaaacaaacccacagccaacatcatactgaatgggcaaaggatggaagcattccccttgaaaacaaaaacaagcacaagacaaggatgccctctctcaccactcctatttaacacagtattgaagtccaggccagaacaatcaggcaagataaagaaataaagagtatttaaataggatgaggggaagtaaaactatccctgttttcatacaacttgattctatatgtagaaaaccccatagcgtcagccgaaatgcctgttcagctaataaaaaactgcagagaagtttgaggatataaaatcattgtacagtggcagttcctcagggatctagaactagaaataccatttgacccagccatcccattactgggtatatacccaaaggattataaatcatgctgctataaagacacatgcacacgtatgtttattgtggcactattcacaatagcaaagacttggaaccaacccaaatgtccatcaatgatagactggattaagaaaatgtggcacatatacaccgtggaatactatgcagccataaaaaatggtgagttcatgtcctttgtagggacatggatgaagctggaaaccatcattctcagcaaactatcgcaaggacaaaaaaccaaacactgcatgttctcactcataggtgggaactgaacaatgagaacacatggacacaggaaggggaacatcacacaccgggacctgttgtggggtggggggaagggggagggataggatttggagatatacctaatgttaaatgacgagttaatgggtgcagcacaccaacatggcacatgtatacatatgtaactaacctgcacgttgtgcacatgtaccctaaaacttaaagtataataaaaaaatttaaaaaataaaatcactgtgcaaaaatcactagcatttgggtataccaacaacagccaatctcagagccaaatcaggaacgcaatcccattcacaattgccacaaaaagaataaaatacctaggaatgcaggtaactagggagatgaaagatttctataaggagaactacaaaacactgttccaagaaatcagagatgacacaaacaaatgggaaaacattccatgctcatggataggaagaatcaatagcattaaaatgaccatactgcccaaagcaatttacagattccatgctattcctatcaaactaccaatgacattctttacagaacttgaaggaactacttaaaaattcatatgaaaccaaaaaagagcccaaatagccaaggcaatcctaagcaaaaggaataccatgttaactggctttaaactatactacaggactacagtaaccaaaatcatggtagttgtacaaaaacagacacatagaccaatggaacagaatagagaacgcagaaataatgccacacacctataaccatctgatcttcagcaaagctgacaaagacaagcaatggggaaaggactctgtagtcagtaggtggtgctgggataacaagctagtcatgtatagaagattgaaactaaaactctactttccaccatatacaaaaatcaattcaagatggactaaagacttaaattttaaaatgcaaaactataaaaaccctagatgaaaacctaggaaatagcattctggacattagccctgaaaagacttcatgacgaagactccaaaagcactcacaacaaaagcaacaattgaaaaaaggggtctaattaaactaaagtgcttctgcagagcaaaataaactatcaatatagtaaacaacctacagaatgggagaaaatatttgcagattttatatcggacaaaggtctaatatctaccatctataaggaatttaacaaattttccagaaaaaaacaaacaactccattaaaaagtgggccaagggccgggggcggtggctcatgcctataatcccagcacttttgggaggctgaggtgggcggatcacctgaggtcaggagttcgagactagcctggccaacatggtgaaaccccatctctactaaaaatacaaaaattagccaggtgtggcggcaggcacctctaattccaactacttgggaggctgaggcaggagaatcacttgaacctggggggcggagtttgcaataagccaagatcacaccacttcactccagcctgagcgaaagagtgagattccaactgagaaaaaaaaaaaaaaaagtgggcgaagtacatgaacagacacttttcagaagaaaacatatgtatggccaacaagcatatgaaaaaaagctcaatatcactgatcattagagaagtgcaaatcaaaccacagtgagataccatctcacactaatcagaattgctattattaaaaagtcaaaaaataacagatgctggtgaggttgtggaaaaaagggaatgcttatacactgttagtgggagtttaaattagtttaaattagtgggagtttaaaaccattgtggaaagcagtgtggtgattccttaaagagataaaaacagaattaccatttgaaccagcaatcctattactggatatatacccaaaataatataaatcattttaccataaactcacaagcacgcatatgttcactgcattactattcataatagcaaagacatggaatcaactaaaagcttatcaatgacagattggataaagaaaatgtcgtacatatacaccatggaatattatactgccttaaaaaaagaatgagatcatatcttttgcaggaacatgaatacagcttaaggccattatccttagcaaagtaacacagaaacagaaaacaaaatactgcatgttctcacttataagtgggagctaaatgatgagaacacatggacccatagatgggaacacagaaactggggcctacttgagggtgaagggtgggaggagggagaggataagaaaaaataacaattgagtactagacttagcacctgcctgacgaaataatctgtacaacaaactcctgtggcatgagtttctctatattacaaacctgcacatagtaccccaaacctaaaataaaagttttaaaaattcagttctatcaacacataaccctctgaacaaagtacttccaactacctactctgtttccatgtcttagaggacatattcaaccatccctatctgaatgtgccttcccaagccttcgaaattcttccaagttattcaacaaacaatcattgagtactaactctggatcaggcactatctaatcactggcacacaaaaatgactaaaatactatccttgccctcacatatctcccaatcttgtgccagaaaggcacctaaacagaaacccccactataatgtggtatatgctgtgaaagaaatatgcacaggatgctacggtagaacaggtaaagggtatctgatctagtataccctgagatggctgtggggaaaaatagaacagaaattccggaggaagtattgactgaattcactcttaaagaatcagtgaaaaatcacctggggtaggtttgggaaaggaagagaatagaattctaggcagtagggacaacattagcaaatgcatgaagactaaaaacaataaaatatgtgctgataaccataagtagttcactattgctgaaaaagaaagtgacacttggaagaatagcaagaggcatcagggttgggattatgagacctagaaaaccatgtaaaggagtttgaactccatctcctaggcaatgcagaatcattgagtgcttataagtagcagagggatgtggttagacttgttatttagataaaccattccctatactttgttttctatatgtacatttgctatggtctgaatgtttgtgtctccccagatttcataggttgaaactaatccccaatgtgagaggattaagaggcagggtttaagggaggtgattaggttatgaggagtctgctctcattaatggcattagtgtcttcataaaagaagtttgaagaaggctttttgccacttccaccatatgaggacacatagaaggtgccatctatgaggaagcccccgaccccgcccaaacaccaaatctgctggagccttgatcttagactttccagcccccagaactgtgagcaataaatttctgttgtttataaattacccagtctaaggtactttgttggggcaatttgaatggactaatacagccttcctctaaaaaagtggcccatagctttcatcagattctaaaaggtatccatgacccaaaaggatcatggaccttggcatggagaataattctaaatatgaccatttatcagaagtatctgttcatatgttaaaatagtcagatgataggacataccccatgcctattgaatcagacttaggatgtgggcatagaaatctatatgttttttaaagctcctttagtggtgctgataggcatacaaattcaggagccattgatcaggaccaagagagctagatttcaactcttaactgccaaggattcatccacatagactctatctctttttgtttacttgcattatcaatgaccttttccctcgaatgaggtcttaacttcatgtgagaatgtgtccttacttttgaaaactacagtaggataatcattaaattgctggataaggcaaccccaattttcttgcaggagccatggcccacctttagtaatttagttgggtgattcccttagataatctgtgatccaggctaactcaaaaaggtaattggcttttgcatggttatttaaggagcggttttgtagcattcatgtaggatgcataaggtattcacctaaataacatgaagacagttgtttccataattaaagattaagtgatatattgcagagttgttgcctttaagcagtttgaggctttatttttatagaaactacaagatgatgggcgaggaaaaaagggggcctcaaaataaagtatttagacaatgttatgcaaaaaatagctaaaggaatttgttcctgccaatttctacaagctataaataaagagttagggagtgaaaaggaataaaccaacatgtaatgcttctgagatatgcttggcttaaagatacttttttcttcaaaaaggttggaaacagattggccatagatataatattcagtgaaaaatctgaatgttctctttcttacctaaggaagggggtggaatatcatacccatttgttgggaaaactaggtcagattatatccattcatagatgctctaagtcagagctagaccaagggtttgggatcatgaagaataacaaaacatattagtcacccgatacagataatttcccatatctgtcaaaaatgcaaaatgtctatcactcttagccctctcctcccctcccatcttcagaagcagttttgcctatcatgaccatcgtctctacgtggttaaattgtattattgataatgtcaacacactggttgatcctttgactcaaggtgacttggtttggaaatgggttcattttcccactgagaatcttcaggccaattaattcaaccttatttggaaactacaggtaattaattattttttgttaaccttgagcactcccacaagataggatagcaaaaaataaaagatttggtgggatttcacgtgctatatttagtggaaatgtcatataaactggaggatgaaatcttcctacaaaatcaaaatccaatatatggaaagactgctaagaaataggactgtcttacttagtaagagacaggccgtttctgctgtaactttctatgattttaagcatttaggaaggcattccttaccccagtattagtagaatctaaggagtccctggataacctttagggagtccatgaaactctttaatgatgtcatattatgaaatgtcaaatattgtgtgcatgtgcttatgtgtatccctgggccagaagtcataactttaactgaatcttaaagaagtgtgggacccaacaagcttgaaaaccaattgctctagcatttccacagtaatgcaaagcctactttcgtaagtcctgaatgtctccctatggtatagccaatctacttttaggaaaggtgctgtgttgtcttcttattggctaatatttgttttcaaaaatgcatttcgtttattgtctgtgaatttgcatattcataacacatcttaaattgaagtataacatagtaaagtgcataaagagaggttaagtatacaattccttgagttatgacagttatatgtacacttgtaaccacctcccaaatcaagatataaaagatttaaattaccctaggcacttctctcataatgctttagttatttctcacctccttcccaatgcagagacaaccactgttcttattattatcatcacaaattatttttgccaatttcaaaacttcataacagtattttcttaatggcatcttctaatgaacttttcactgaaagaaacttttcatcaaaattgtttatttttatttttattcctttatttcatatttttttttatgattactttttgtttgtcctaagaaatgttttcttactccaaggtcataaaaatagtctccaaccttttcttaaataccactgcttttgatatgttgatcttgtatagtaagaccttcatatattcacttatttctattagttttttgtggattctttggggtttctaaatacttctaagtagaattgaaatagctttacttcatccttttcaatctttatgactttaattttttattattggtattactgcactggctgggattccagtacaatgttgaatagaaatggtgagagtggactttgaactgtttctgatcttagagggaaagtactcaatgattcaccattgattataatgttaactgtagggttaacatgttgagaaagttaatcaggttgataaagtccccttctgtttctattttactgagactatttataataaacagtggttgaattttgttaatgctttttctgtattttttgaaatgatcttattatttttctctttgctaaaaatgtgagtaaccttgagttgactttctgtgtaaatcaaccttgtgtcccaggaaaaaactccaattgatcatgatgtgttatcctttttatacattgctgtattcaatatgctaatatatttattttttgtgtctatttcatgagggatatcagtatgtaattgttttttcttgttatatctttgttggttttattaatcaacattatgctaacttcatacaatatattggaacatgctccctccttttattttctggaagggttcatgtaacactgaaattatttcatttttaaacatttgatataattcattaaaaatccaattgttccttgatattttctaaagaaaaggtcattgttacaaattcaaaaccttaataaatataaggccatttatattttctgtttctttttgtgttggttttggtaaatttgtatttttcaaaaagtttttcactttaacttgttaaatttattggtattaatttttcataatgttctctttttggtctttaagagttaatttaatttaatgagtgtacattattttttaaaataaaaaagaaaaacttgaaaatgcaaattaacaaccacatccccatttgccccaatacgctgtagaccccaccacaaacacaatacagatgagtgaatcaacagtaacgtgctcagagctggggcatgtgactgttatgaccgagttccatattattgtctacacctaatgcaatggtgcaatagagatccatgtgatgtggcacttcaccatggaaggttttgcagattgctgaatcgagacaggcagtggaatataatagaaagcacactcggaaatagattggttgattcgtagatttactagtaattattatgtgaccagggacaatctcttaacttccttatgcctcgtggtgcagcaaaatatcacaaatcaccactaatgaacttactgatataaccaaacaccacttgttccccaaaaacctatggaaataaaaataaataaataaataaataaataaaccaaaatacctccatattgaccagataaggaaactgaggcataaggaagttaagaggttgtctctttttggtcttctaataccttctaatacctgtatagtgatgttctctcttttgttcctcatattggtcatttgtgtaattaaggtctgctagagatgaaatttctcaactattgtctgtctgaaaatattcttgccattcttttgaaggatttttttttattagactttaagttctagggtacatgtgcacaacgtgcaggtttgttacatatgtatacatgtgccatgttggtgtgctgcacccattaactcgtcatttagcattagatatatctcctaatgctatccctctcccctccccccaccccatgacaggtccccgtgtgtgatgttccctttcctgtgtccaagtgttctcattgttcaattcccacctatgagtgagaacatgtggtgtttggtttttttgtccctgagatagtttgctgagaatgatggtttccagcttcatccatgttcctacaaaggacatgaactcatcattttttatagctgcatagtattccatggtgtatatgtgccacattttcttaatccagtctatcattgatggacatttgggttggttccaagtctttgctattgtgaatagtgctgcaataaacatacatgtgtatatgtctttatagcagcatgatttataatcctttaggtatatacccagtaatgggatggctgggtcaaatggtatttctagttctagatccttgaggaattgccacattgtcttccacaatggttgaactagtttacagtcccaccaacagtgtaaaagtgttcctatttctccacatcctctccagcacctgttgtttcctgactttttaatgatcgccattctaagtggtgtgagatggtatctcattttggttttgatttgcatttctctgatggccagtgatgatgaacattttttcatgtgtctgttggctgcataaatgtcttcttttgagaagtgtctcttcatatcctttttgaaggatatttttagagggcactttttatctttgattctcaataacttgactattttgtgctcaggtatatttttcttcatatttatcctgtttggaattgattgagtttcttggatttgtgagttaatctaaagattacatccatttttgaaaagttctcagccattgtgtcttcaaatatttttttctcccctattcactctaacctcttttttggaggactctaattatttaaagttagactgttagatattatccttctcttgtggaagctctctttgtgttttaaatgattttttctttttacatttcagtttggataatttttattgatatgtctttaagttcactgatttttttttttttttttttttttttttgagacagagtcttgctctgttgcctgggctgtagtgcagtggcacgatccggttcactgcaagatccgcctcctgggttcacatcattctcctgcctcagcctcccaagtagctgggactacaagtgcccgccaccacgcccagttaattttttgtatttttagtagagacagggtttcactgtgttagccaggatggtcttgatctcctgacctcgtgattcgcccgcctcagcctcccgaagtgcttggattacagacaagttcactgattctttagtctgctacattcagtctgttgttaaacccatcaaacaaattatttctgatatttctatagaatttccatttagttcttttctatcttttcatgtttctgcttaaactcctcagcttttcaataatgttgtgcattgttctcactagattatttaacatatttataacaattatcttaaagttattttctgctaattccaacagttgggttgtatgtggatctcctctattaattttttcctctttatcataggtatatttttctgtttctttgtatgtcttgtaattttgtattatatactagaaattgtgtataaaaatgatagttatgactgcagtaatactgtgctcagaaaatatcatgcttcttcttctgttaggctgctggtgagagatctcaatctgatttgtagttgagcagggtctgggcttcattgcagctttagttagattctgttcaccactggcttcaaatatttgaggatggggttgagactttcccttcagtgggctttggatctcagcactaccaccaccagactctaaaggtctctatagcttacagttcagcttccagaattccaagtaccatgaaaatgctctgtgctttatagttcagctgccagttttttggggaacagagaaatttcctttgcttttcatctctacccctaggtctccttaccttgggagatctatttctccccaggctgttacacactgctcccagccttcagcaagacattgcattgcacttgatgacagcacctcagggcatctatctcagcaatcctgccccttccccagctttcattaagtcactactttgcatttgattaaggtcctgtgtaccttcaaaatagactctctcagccctcatgccttgctcccaggctttagggaattgctgacttatacttggtgaaggtcctgtgaacctcagggttatttttcttaacttccttgtccttgtccttagcctttgattggccagtgccatgtattcggcggaagttcaatatacctgggtggggacatcttttctgtgtgcttcagggaaatctttctcaactttcttgctcttcccctggtctttagtaggccaccgccttgcactgttatggtcctctgcatcttggaatggaggggatctttctcagtgttcttgccctgtcctcagtcattggtgggccactgcattttacccagtaaagatccagtgtgcctcaggcggatttctcttggacctcctatcctgcctctagcattgagtatcctgctacttccacttggggaatgccccatgggaaaaaattggcaggtgggtaaagatcaatatttgactggattaccttggaatttgaatttctcatgccaacccactgatggccactaaaaatttgttagcagtttacttgatttctccttaccccactctataacggagtaacaccctagagttactaggaatgaaagcagtcataggacacttttctcctaggaatgcattgtgtcttcctaagatttggtttatttaaatttctttgcatcttctgctctctgctaggctttaagttgaccgcaatattgcagcctattgaacttgtactcattgtactcattataaggatgagagtgcaactcctgtaactttctacatcgtaaccaaaaatttggaagtcaattatttcatgcccaaagtcttcagagccagatcttctctaacgactttgaaaataatatgctttctactatcctccacatgctttctctggcaagtgcaatagaatcagatatgacccacacttcagtgttttgcactgaaactttttcattagggggaaggaagatgagattcaagagaactattattattattacttaaattttttctgggagtacctgctgttagccaagcagtcatcctgagccctatcaaactgaacctactaaatctttgtgttatgacaatgtctttcacacagatttagaccctcacttttctatctgccacttacttctggtggaaggtgtccattaggtccctttgtaagaaaaaggtttacttcatacccttttcagctagttaaatccctactcattttttaagatgtcagttaaatgcatatcttccatgaagtcagccccagcatatcttacagccttgctacactgctagtgtaatcatcaccattttctattgtgtacataatgctaggggaaatatgagacctccttcttaaaactgcccacagggtggggcgtggtggctcatgtctgtaatcccagcactttgggaggccaaggcaggcagatcacctgaggtcaggagttcaagactagcctggacaacatggcaaaatgctgtctctactaaaaacacaaaaattagtcgggcgtggtggcgcatgcctataatccctgctcctcagaaggctgaagcaggagaatcacttgaacctgggaagcacaggttgccgtgagctgagatggcaccaccattgcactccagcctgggcaacaagagtgaaactctgtctcaaacaacaacaacaacaacaacaacaacaacaacaacaacaacaacaacaaagtgctcacagattatctagaattgggtttccgtgacctgacaggttattatctcccttggagtaaggatgaggggctagactagcatcttccaaatcataggtcctatgagggtaagagaggtgggtttccctaagagaaaacgggctgctcttggcaggaaagggcactagctgccaagggggtgatatttaaaatgctttaattaaaacttagttgatatgaatgttaccagaagaaaaagacaattgagaggaatgcttaatttgtacgtgtttcaacctaaaaacaagacacaagcgacatggtacccaggaaaaattttccaacatccaataagatggctaataccagtaaattggtctctgcaaggaaatgatagccaactttttttctttcttaaccactgaggaccccttggttaatttcacttccctggaccccaatttatttcaaacactttggctgccaaactgcaattatcaaaaaaatattaaaccacagactcttagcaattatagctcagcattattttcccttctttttaactgcgtggcaattaacctggtggccaaccaaaaataaatatactaatttccttatttaaattctacatagctttttattggagaagtttagattttctactagtagactttatttttattttttgagacagagtctcgctctgtcgcccaggctggagtgcagtggcacgatctcggctcactgcaagctccgcctcccaggttcacgccattctcctgcctcagcctcccgagtagctgggactacaggtgcccgccaccacgcccagctaattttttgtatttttagtagagacggggtttcaccgtgttagccaggatggtctggatctcctgacctcgtgatccgcccgcctccgcctcccaaagtgctgggattacaggtgtgagccaccgtgcccggctagactttataatatattgaaatatattgtgaatatgcagtgaagatctttaaaatagttacaacatttgacctgccaatttcatgtttattatttgtcctaaaacagtggtcagggatatgaacaaagatttatcttgaggaatatttaccactgcattcattacattaaactgttgtttaaatgtttaccatacaatagtaagaaattacaaaacacctaaatttccaagagtagaagttgagtgaaaacagtatgaaatataggaaatggccagacaatggagcactatgcagcattaacatttgattagataagatgatttaatgacatggaaatatgttctctatacattaagtttaaaaaaaatgttctaaaatgacatctttggggagcagccaaaatagcctccaagtctccttctttatagcttaacatttttttctgctctaagatgggatgctacgatcctgtctgattaaagacacattttaggcctgttttaccagcatatttggtcaaggaaaccaagttatttgcagtttagtttggaacagaaattcaaacttggcaaataatttgcatattgacagaagcatgttttctttctttataaaatgtatgtcaccaagaaagaaacaataattggcacctaaacttcatttcagtactgagctacctcaattacattccactaagtagaatgaaaaacaggccatccctcaaaggcagacaaaaaaaaaaaattgtgacttagcacaatttctgctgatggatttctgattcctgaatgttatgacgatttcatgttaagaggcattaaaacatgattataattgaaaacaagagggcctgtgacactagagggaccacggtttaatttggattagtattaaggtcctgaacattaaactaagaatatttcctcttcaacaggttaaaataaactattttggcaaaatattaactattactaatgggtaaaaactacatattgcttgtaccaggtgctattttaagaactttacatttattaactcatttaatcctcaggagaactctataaagtatagactactacttacctgaaaaaactgaggcacagagagatcaggtaatttcaatgaggtcacaaaactgtgaagacaaagagtcaagattcgatcccaggtggttgggctccaaagactgtaattttaacctgtaaacttggacagtttcatctgcatgaggccaaaagctaataaaaaccttgaatccactctagtaggtgagtacctccactgtatcctctaaagcatgtttcagcctagaggagtacccaacctagtctaatttctcccccaatattttgagttcctgcataccacagaggctgcacaaagtcaggggaggctaacgtaggatgacgcaggcatctacacataacttgtcattttctcatctcatgagtggactcagtggaaatgctcagaccataaatcaacaccatctgtaattgaggtttgctcaaggtatctttgcatgctatagcattcattgaaatatctgtgaggtaggttagaaccaaatttaacagttacttctccaactagccttctcatttgttctccaacttgggaatgattctatcattagacacaccctggggccagattttacaagtggcactatcataacagtgtgccagcttaggacctgagttcaccacattcctttctgagcctactctgatgatttgccttggactggccttgtccaagctcaccttgacatctgccttgttcagtgctcagtaggcagttgttgtttagaaagtctttgtaagtaactattttaaagtcaccattttacagatggacaaagtgaaatacagaacacaaaatgtgattgatgtcataaagcaaatcaatgctcccaaatgcaatttgccattcgctctcctgtaaatatgtgaaattggtgacttaatgttcttactgtaaaaatgcccaaagaaagagaatagaagaagagtaacagagttgggggagagctaccactggaatggaaggagcgagggaggaaaataggaaaggaggaaggagtattgcgagaacataaaaccttactacagtggccctgaatcatggagctgcaacacacctggagcacttataaattcttttgagaaatgccagtgtgacatacgcctcgcaagccagcaattcatgaactcgatgcagtagttgaaaccaaaggggtaatggccacagctgtcaggatccagatgctctggggctcggccctgccactttgtcccagcattcatgcgaaggaatgctgtgaactgggcatatcaccactgttcaccctggcctgcttccaacagcaccggctgcatctggcctggaagatggccatggctggcggccctatgttccccataaggttgggcactgggctgcagccaggctgcgagtgctggacctacatccagcacactctccgtccaacctcatctgcctgtctaccccagaacccccaaggaagcttggcctttcctggcacacagaatcctcctgagaactggcgtctttctgcagtcaacagaaaagatggaatgaaaaccacacagatgaaaagtcatgtcatttattaataatttcttttttttttcttctataaattggaaggaaaaagtctttggtgacactctctataaaacaatctatcttggatggcgaaacccagacataaagttacacaggtcagtgaagtaaatcaatatctatggctttgtattttctcacacgcgctctctcacacatacttgagggcttaattacgctaagtcattaatactctataacaaatgggaaaaacacttcagaaaagacctgtggtgacactacaaaaacattggcaacatattagaaaactctgtcccaagtgtacatcgtatacaaaataaggtatacttttgttttttgcgttacaatttgccacctaaaatagttccagtttttgatgtctttctttctgcccctcaacatatcctatacatattgttctctcaaaataagtacacaaggttcattacatggtaaccaggtcatttgcatagccctagttttagtaatagttacaaccgaaaggacagggatgtattcctgtaggagaagaacagaaaactattgcagaaatcaaatggcctgaggcctaaaaggcaaatcattacaaaaccagagtgactgaaaggctagcctgacttgattttaaacaagggtgagactgtgctatcctgagggctcagctttctcaaggtttgccttcttctcctagttgctgggccatgttaagttccaattctgggtagctcactgaggttcctgatataaaatgtattggaactctagaccagtgacaactacaatccctactaggtaaaactcatggagacaaaagcctttgatttttggaaagggcaaaaaggggagagatggttttgaggagtcaaatccatcatcacaattatggtgtaaataacagcttttttatccagaggttctgtacagcattattgaactgatgggagagaccactatcttagggtacttaatcccccaagcttttttttttttttaaagaaaaaaaaaaggggggccaggcgcagtggcttacacctgtaatctcagcactttgggaggcagaggcaggtggatcacctgaggtcaggagtttgagaccagcctggccaacatagcaaaaccctgtctctaataaatatacaaaaattagcccagtgtggtagcacatgcctgtaatcccaactactaagcagggtgaggcaggagaattgcttgaaccggggaggcggaggttgcagtgactgagctgagatcacaccaatgcattccagcctgggtgacagggcaagactctgtctcaaagaaaaaaaaaagacttggtgtcaaaggataaactaatctctttatgctgaagttcttataccaagtgagacaagtttagcacagtttgatattaatgcttatttgctgagaactcaactcaaaacaactttgtccctgtaagcatgcctgagaaaatgaggctgatagtgaaagaaatttcttggttaaatctggccaagaatgacaaaaccaactgaaaggttcttgtccatagtcgctgtaaaggggaactaggtaaatgaattcagcaactgcggtcctgatgtactggctgcatgttgattatattcacaagtaagaggcaggagcatttttatttgagagttcatggcaataactgctacttttaaatactggagatctcaagagacccaagggaacacaagacacttccaggtctgggaagtttgcttggcttttgcatccataattcagccttgtccagcaagaatctcattcagattccaacctagtaaggctgtcttccccctgatcctgccctttaaacaggtttgttcttaaatcaagtgccctgttttttttttttttaattaaaaaaaatagtatataggcctattcacattcattcatctcacccctgattaaagttcagtaacctttatgaaaggccaccagcataatactctttcaagtcaccaggtatttgagaaccaccaaaataaaggctaacatagcctactgtaatgaaaaccaaaagtcattctaaaagggaaattgaaggatgcaaccggattgatccttctttgagcaccatttgtcacaagaagaaattaaactgtaatgcacataagattccagtaacaagctttccctttttttttgaagcatctatctgaaagtgtgttgatacgaccaggtaggcccacctagctatgctatcttttgtggtatgactatcgtgattatttcatggatttttctctacagtctcaattttgagccattttgctagcttcaacaaaggtgatatgtattaatgtatttgtaagctttgatatttataacactttcatataaataaatacacagccagcttttaaaaaattacttttaagatcctgtgtcttaatgtggagctgggaaaagatgctgtgtggaaatccataagtggctgagtcctctttggaatttctgcaagcaattcattacgtggttggcactgtactctcagcccttggcttctctccaatgcagcacatgttagcccacttagggacccctagttatcattaaagttgaccaggagataattcctgacaccctacagagatggctatgatttgtcaacttgttgcaatgcaatacaactctttcctaactgaattaaaattacatattactgtcgagcttcactgatttgttaagcattgttctattcccagccttatattccaaatgggagaagaacacgctagctcacatcccaaagagatttgctcagagaatgacataaaatgaaactgtggagatttaaagtggatgaaaggtgtgttatatcctgttcttatttataattaccatttttcttcacataacacatgttgtttgtggaggatatgtgttgtgagcttggtgacaggtcaatctggcaaagcaggtccttgaatccacttgtgtgactgactggtacaattagggacattgctttgcaagccaatatgaccacctaagtttcaagttggttttggggtcattgaacaaaatatcgcatttattttttggtaaaggagaaacaagaataatttgccaatcctgaaaaaaataatttaaatacaaattcacaaaggccaaatgaataaagattaactgctaatcttttaacttgctgagaagtgcagcttaaatgacatgaaacctgtaagaccaaacattttatagaaaagacacaagtgcaagcaccatggacctaagaattatttttcaacaaatgcctaagagataatcacatctacttaggggaaaatgtcacatgtttgagaatggactatggatgggtccaattagatgagagaggtatttagggagctgttctgagtcatgaggctgaggagaaaatcctctctttaattgaatttcactgtctacgcacctctcaaaacaccatctggatatgtgggctctactccttgttctgcagctaggtagcctgttgagtcacttctctggacttccacaaacactttcactcctgtttacagcaccatccccgtgctatcattacaagctcctcttcctctcccagatgtctacaaagaaaggatgaggtaaagtccaatggacttacggtttccactgacctaagatggccacttgaaattatcagaacaaaattctctgatgaacttttcttctaaaacaaaactgaaaataaatggaaaagaaatatgaaatgtatgagagtttgagggagggactctaaagtgcttattgtttattcagcataatacatggtcaaactcaataatgtctttctcttccctgttttctctggcctcttccaagtagaagaaagcatttaatatcagaagtctccatttttcataacagagttagggatatgttttttttttcagtttatacttggagtttaacaataatcataagcccaagatagcattttcagggatagaaatgttctttttaacaagaagcacaactaaacttttccacagatttaaaaattaaaagtaaatgaaactatattcacatttgttgttgattattttgtttgccagattcttgctcaaaacaatgtttgaccaaaaatggcattagggtcccaatggcgagacatctcctcagttactttgcagcaatcctcttgttcattggtgtgaatttctaccttattacccctttttctttctcaaaagagaaactctgaaacttgagattctcacaaacattaaagagttcatcttgtaaataatctgttctccccaatatactcattattccttggcttctaaaccaaagcctcttcccagtgctacgcagacttaggtcaatggttgaatctataaccgtgcccccaacccctgcaagtattgggttactgttgtgggtctgtatttccatctcactaacatgctggtgggttatctggatagttctttgtgcaaactgaacatttcttaattatactagtgttttcttggtactaattccccccacccccccaatgaaaaacgattatcatatatatctatctcaaacatagagatttcagttagaactgcctacctggaagtcgtaatactttctttcatgcagcgacattttagagataaaagttcaagtggatttgaagattcgaagtggaaaacaatttgcactggcaaagttgaataatgaagttacaacttatgctcagttatttcttgataatgggtagagtgacttattgtgttttccacgaagtttgagcttttgaaactgcagggcaccctacatggccatgacaatgatgtctgtgggaaaaggaatagcagctttgaaatattcacaaccaacacaattttgattaaacaaagaactctggtttttaatagttttgatcattaaaaaagtttaaacctgcatagcaatcatttcaaaaataattatttaatgttccataattaaactgtacacaacctagtcttgggacacagaagccagtgaggtgagtttggagcagtctggtgcagtcccaggagccaggagttgagttctcattggcctttttttttttgtcattctgctcatctaagtttttggatagttggcacaatctggctctgctgatgagtggatctgcactgggaagagagagcagcttgacccccatcccttcttgcttcccctcccccactcagccggattcctcaaagtcgctcaatgtctcggtatttcttcctcaaaatagagacctggtctttaaagaggacggggtcgagcctcatctgagagtggatcagcggcatgtagccaaaccagctggcaaacgtattcatgcagctctgtcgctgggcaaagtggtcagggtcagcccaacgggaagcccgagaagtctagggagaaggagagaaacaaggataatgatgagagaagtgcaaggtgagatggaaacattgcagaaaatggagtcaggcaaatgagcaagcagcaaagcttggggtctggcccggccaccaagtctcaccatctatgcacctgctgaaaatgcaatcgctgatattggtttttcccaaggtatgctacgttcctcagtgttaaaaacacaaaaacaaagattcatgttgactttaattctctaaaatttattgactaattctctggtcagtccacgacttagcaactgaaactcgactactacagtgactcaatctaaaacctctctttgcacttgggaccaagtactaagattaaagatgtgtttctgctttcaaagagttttctaaatccttcctgtttatgtagttgatttagaaatacccaccaacttttagaagtctatctttctctctatccatcacttccttccttctactatctctttacctttataagggtcctactaaatcctttgttaaaaattcacatatatagttgaagaagaacaaaatagtgccttttacatgtcactcaaggctagtgttacgcagcatctaaaactccgttttctcttctgtagcctccccattgacgtgactccatgaggatgagaaggtgagattcagtggtatatagagcatgttgctgtatgactaactttatactaaaatctcaaaattctgttcttctcttaacccaagaattgttggctttcctgcttgactaaaacccccaaaggttactttttaaagggcaatcagccctccaaagaatcactgctcacccagaataaagattaactctcgacaaatagaaaagatggctaccatgtttttagctctctgtgttgcccctaaagttggttaaatatttttagatcatgcaaatgattggcattgatttaaaaagaatgccttaatgactggagtgctgaaatttaaatagaatgactaagcacattgtctttcaatccctgtttttatgaaacatggaaaagatgggctgcccaattatgggggaacccccacaagcccatttatgtcaataggcaagtctttaatgatgtatatgtatgcacgtgtgttctgtgtatttgttgtactcacagttttagaaaaatactttcatgggaagatacattttagtgtgagaagcagtaagagtcacttcagaatcatagtgtcaacatgctcgaaaataacattgaagataaacacaaatgtcaagttacctctgaacagcagaataacaaacaaaacactatttgtaaagtgttttcatggagttcatttgaatctcaccacaatctggtgaagtatctacccaggtaataacatccccattttatagctgaggaagcaagtttaagaaagttagagttatttgttcaaggctagagaggggcagaactcaagcttcattcttcagcctttatatgaggggaactctacttgataaatcagagaaagatatcaaatggagctgactggttgagttcatatcagagtagacaatcccaaatgtaacttgttttgaccctaaatggatatgagtttgtgggccatttttttttcttttttttaaaggcagagtctcactctgtcacgcaggctggagtgcggtggcatgatcttggctcactgcaacctccaccacatgggttcaagtgattcttgtgtctcagcctcccaagtatctgggattacaggtgcacaccaccatgcatggctaatttttgtatttttagtagagatggggttttgccattttgcccaggctggtcctgaactcctgagctcaagcaatccacctgctctggcctcccaaaatgctgggattataggcatgagccactgtgcccggcctgtgggccatttttgattggcccactcattcccaaagggtgctgtacccaggcaaaatactcatatatgcaactagaaatactgtctagagtttacactcattcctattcaaaaaattttttttaaagttcagttgaatcattcaggtatcgttttgcttctagatgttaacatttattctgagtcaaccaacatctattagaaaagatgcctttcttatgtaataaaagcctaatcctagaggatgatatctatttactttaccggtcatacaaacattcaataaattaatgtgtatgatggaaagaagggggcaaatatagtacctgaatacacctagttagacctaaggttaaatttagatttttttgttaaagatgtatgaattactagaaatactgtttggtagaattaggctaatctatgaaaatagcacaaatccaccccctaagaggccttgtatgactagaattccccacttagtgagtgttctgaagaactctgagtaaaaaaatatttttaaaatgtcatgtccttaaatgagataatatacagtcatgcaccacataatgacatttcaatcaatgttggatcacatagatgactattgtcccatatactgtaataccatatttttattgtaccttttctgtatttagaaatgtttagatacacaaatatttatcactgtgttacaactgcctacagtattcagtacagtgacatgctatatatgttatagcctaggagcaataggctatagtaggctgtaccatatagggctgtgtaagtacacttgataatgtttggataatgacaagatcaccaaatgatgcatttctcagaatgtatcctcattcttaagagataaataaaaaatataaataaaaatgtttgggcacataatagacaatacatcttgcttgaattcgaatattctctcagccttaaaaatttttacaaatcctcttatctgttctttctgtaattagaaggaaacagaattttctgccagactctttgctaaggacagctctttcatcataaccaatacctagaacagtgcctggtaacatgctcactaagtactaaataactttttataaactttaaattctttataaactttaaatttttgcttactaaatttagtgaatgaaaaactatcagcttaacatgaggcctagctaagatttcctttgcaaaagctagatttgtatatgttttccaatgcctgtgagaacaaggcacatgcaaagcccctcaaaattgaactaatataaccatgttaaagtatgttcattcagattaacctcaatcctgttggatgctccatgatttaacgtgagtgaatcttaatgctctttcttaaggttttttgtttcttttttctttttctttttttttgagacagagccttgttctgtcacccagcctgaagtgcagtggcatgatctcaacccactgcaacctctgccttccagtttcaagcaattctcgtgcctcagccacccgagtaagctgggattacaagcgtgcaccactatgaccagctaattttttgtatttttagtagagatggggtttcgacatgttggcaaggctggtctcaaactcctggcctcaagtgatctgcctgcctcggcctcccaaaatgctgggattatcagtatgagccactgtgcctggctaagatttttgatttcttacatatagtaggggctctgctcaagatgaataaagatagatgaaattcggcatatccaggtggacctgataccaagatggtggggtgtacaaggacaagcagtgaagtccacagaccctgggattcaattcccaattctgtctctaacttactgggcaacttgtggcaatatgcttaaattcactaggtcctagttttcttacttataaaaagaaaatgttggattctatttccttgaaaatacctttaatactaaaattgtataactcaacacaatattttacttcacttttataaaagctttcaaacatattatttcaaccctgtaaggtagatttcaccatttccatgttaaagatgagccaactgagtttcagaaggttactgacttgcctgtattttaaatcctgattctagaactgaaaattaaatattgtgattcctgttatgtcaccaagacacaattcaactcaactgcaagcaccagaaaactgtgttaaagagagtatggtttgctagacattaaataaggtacctacaatcaactttcataagttatttgtagggctttaattctgctgagggctgaatgtttgtgccccctaatatttatatgttgaagcttaattcttaatgtgatgatatttgcaggtgaggtctctgtgggatgattaggtcatgagggtggagtcctcacaaatgggagcagtgctcttataaaaaggaccctagagaactctcttgcccttctttctgccatgtgaagacacaatgagcagagggctatctatgaatcaggaaacagtctcttgtcaggcaccaaatctgctggtgccttgatctgggactctccagcctctagaactatgaaaaataaatgtctgttatttaagtcacccagtcaatggtatttttgtcatagcagcccaaatggactaagacaaactctaaagacatatctttctcatgtcaccttaaagattataggagagctttacatccttggcataaagatactcttaacttgtgtcttcctaattatccctgcaccaatcatacactcttttctagctttcagatgtagttcattcctggtttctcctcattatatgctcctgggtggaacagctagaggaacgtgagtcctcattacctggggctgaaccaccagtgagtgaagcaagggaagagggctcttctatacttacctgtcccatcattgtctccttatactgcttcttctgggtcactttgattggaggcaattttgtcacagcagacaccaggaagttcatgagaatgtcctcacaattggccaattggtccaccatgttcttcaggctggctggcaggtaatgggagtataggtagtgataatatctgtaaaaatcaaagatgggtttcacagggggccattatcacatgatgacaagtggacttctgagacagaaaacacatacccattctttgaatccctaaacatgtcatgaatggtaatgataatgatgatgatgatgacgataactatcacttctatggtacttgttatataccagatattgttctaaagtgttttacaagaaatgcttcatttagtcttcataaggagcctacaaggcaggttctattattactcccattttacagatgaggaaacaaggcacagagatacagacatacagacattgcttgtccagtctaactctaacatcagacaggtgagttagaaagaagaactaaataattagatggcaagataagttatttacacatgatctatatattataaagctgcttaacaattttaatcattggcttaatcagaactgtatttaatattatcccttgactctgagtccaacaatagactgttctatatttgtgccctataaaccatatatatttcaatcctgttagagcaaaatctgaattaatggggtggtcaatcgtaacagaaaacccataattaatttgaattatttctcatcctactgtttttaaaatgtatttatatacatatagcatatatttataggaaaaatcatttgagtgaatcaaattcttagagtggtggtggcagaagcaataggaacaatgaactttcaagaagtgaaatcttgagaccaagaatcagtcagcctaaatgtttatgccttgagcatttccaagctatccctgagatagcaaaattccctattctttactaaaaagactaaggcaagattggtgtgttcactaatgatagaagagcaggtattttgttactggttgagtggggaatgttagctatctaccctcactagtttggcaatcttactccagtcccctggctttaaagaccaaatatatgcaaacaactgccaaatttgtatctccacccctgagctttttccatatatccttttggatgtcttaacatgtccaagactgaacctatatattttccctcatacttgttccatctgtagttttcctcatctctgttgatcagccctctaatcttccagtgtttcaggtcaaaagacttggagtcatcaaactctacatccagactctctaggcatcatgctaaagcatcttcaaaataatctgatcactacttaccatggccaccattcacttcctggtcccaggatcccaccatctcttgcctagataatgtcaatcacttcctaatagggcttctgcttcaactctgggtctgttatagcctcttctcaacatagaatccacagtggatgcataaaagaaaagccggatttctcctccctgttcaaaccctgtcctcctcccctgtcacttagagaaaaagtcaagtcttcatgatggacatcaaggtcctgcaggatttatcactgtgttaaaactgcctacagtattcggtacagtgacatgctgtacatgtcacaccctgttcaaaccctgccctcctcccatatcacttagagaaaaagtcaagtcctcatgatggacatcaaggtcgtgcatccatgccccctgacttttctgacttcctgtcacccattccacccagtcacagtggtctcctcgatggttctccagtattctgcctcagggcatttattctcgctgttctcctgccacaacactcttggtgcacatgtcctcttgacttcctgtccttcaagtctctgctcaaatctcacctgtgcaatcagaatcaccctggacacccccaatctgccccatctccaccttcagcacccttgatccttttctacactttgtctgttatatcacttatctccttaataaactatggaattattatgtagacagtctttctttgttagaatataagacctgcattggcaaggaattttttctgctttactcagtgatgaatcccaagcacctagaacagtgcccttgggtgctgacttaggtatttacttttgttgttgttattctaaatattcagttacctaatatgccctgagagtattttcacacttcagaccaactgaaaatgttactctaccataatttctggaaatgaaacatgccaagaggtttcactggtttcaaaaacacacatttgacacatcagcaaaacttaagcggggatacagactaattttcctcaatgctgttaacaagatttggccttagttcctatttatgcagcagccaatataaaaagctatgtaaagtctgtaagagacatgtccagattcctcacttgtggtaaatagcagctcctgtcaacaccatggagtagtcgttcgtccactttgatgtgtatccccaccgctccttagagttatcccagaagtggctgcgcgcggggtaccccacaatcctctcagggaagctctgccacactgtgaaggcgaaatccacctgcaggcagaacacaagccaaacaagcaatcaacagtgttaacaaatgtcaacaaaacattaccttctccccactaattcataatgcaaaatccggggactgtggcgaaacattaattctatgtattcatcagcaaattaaactgactgcttgacattttgccccataattatgcacattttaatgttttctgttaaagaaacttcagagtagtatggaaatgaaaggaagaaaaaaatttgctgatatgccctttaaaaatccagtctgttcaagctaaaacataagttgaaaaagcttcttttcccccttcctcaaaggtgcacgtgccttgattcacgtgagacacaaacacatctgttttataaatgagaaatttcccatgtatatccaaagaatgaatatacaacatatatcatacccagcatatatcaaagccaaagtgcctaaaataaaagcaccctcttaagagtaagagaaataactttaaaaaaaaaacaccacaagttctaacaggaatacagagcaggtatcataaagaaaacataattcaggcttcttaggtttgaagatgcacagtttaagagacactagaagaaagcatcaacagtgaaaatcactaagaataagtggggacaagaacaactgaagccacagaattattttaaaggaaatgcagctaaatgtctctccggtgcttatagtagcccaaagcaggtgcttctgaacctgctataaaccagcacttatagttagcaagtgatctgttttcaaatgcataaactcacttctgatttctatgatcatttgatgaatggtaaatcaaaataataaacagaaaataaaaataacaaaaatagtgacagcaaacaatcatataatgctcataattgtgaaatgttataatacaacaggtgcagctataggtgcttatccattttaactcattccatcctcacaatacccctgtaaggcaggggcttttacattcttcagtttacagaaagggaaactaagatataagttcaagtaatttgctgagctaataagtggcagagccaagattcaaactcaggcagtctggtttcaaatgtgctacgtactttatcaaaacttctcttttggctctgttactccagtgttaaaagcaatttgtctcttatacacgctatgattcacctcgttatctttgccgtatctcttctggataagcaatacaaatggaaatttcatctgtttcgcaaatattttgagtcctggcactgtgatggtagctgggggacggagggatgctgctaggtccaggtcctgccctctcagaggttccaaagcaggacctgtgatggttaattgtatgtgtcaatgtgagtataccatgaagtgcccagattaaagatgatttctgggtgtgtctgtgagggtgtttctggatgagactaacattggaatccacgggttcagtaaagcagactgccctcgccagtgcagatgggcaatatccagtcagttcagggcctgaatacaaaacaaaggtgaaggaaggaggaattcctcccctttttctttttgcctgccggctgagctgggacatcgaacttctattgcccttggactgggatttacatcattggctccctggttctcaggctgtaggactctgtctagaattacaccagtagccttcctgggtctgtagcctgcagacggcagatcatgggatttctcagcccccaggattatgtgagccaattactcataataaatctctctctcagtgtatgtatgtatgtatgtatgtatgtgcatgtgtgtaggtatatatatgtgtgtgtgtgtataaatatatatatatatatatatatatattatgttctattgattctgtttgcctgaaaaatcctaatacactgccctatcttaagataaggaagacttaaaaatatggcttgttccccaaaactataacatccacacggggccaggcacagtgtctcacgcctataatcccagcactttgggaggctgaggtgggcggatcacttgaggtcaggagtttgagaccagcttggccaacacggtgaaaccctgtctctactaaaaatatagaaattggctgggcgtggtgttgcacgcctgtaattccagctactggggaggctgaggcacgagaattgcttgaacccaggaggcggaggttgcggtgagccgagatggtgccactgccccctatcgtgggcggcagagtgagactccgtcaaaaaaaaaaaaaaaatccagagcggggaaaaaacccgggtggtggaaccgacattaagaaagcttggtagggagcacgttatctcaaagttaaaaggtagcaggggatggtgagcatctgctagaaaattgaaattaggttgtgattacctacaccttttcactagtggtcaatactaatggagacaactgatgggacagtatattatgcagcctgttgtcaaaggatcagcctggccgtcagcactctttggggttttctatcattctttgaaaaggaaacacatgcactagcaactactacagaacccaatggggtgttctcatcgcatgaatttcttactatcttaaggctgtttcaagtcatttcaaaggaactcaaaagtaaattcagataaaactatgattcttgtgatagctctaatttcatgcagattattaacacatcaaagaaggcaaaggtcagtttaaggccctttctctcaaaaaccaacatctgttttcttttgagcagcgtctgcagcaatccagataaatgtaaataactataaaccaactataatgccctttataggatgctgtttaaaaatccatccttaatgctgcagagagacatttaaacaatctgagatccttagagaggaaaagaaaagtgaaccaacatctattcacctaaaaaaagagaaaagagaaatccttgcccaggaccattttaggcaacacaaccactccactgatcagcaggcaaaagcaaaccagactgccagcctcttagatttacatatcattttcaacccacgttgacttctaattacttcacatacaacacatgttcctcccagcatgcattgagtggttggaattgctattctttgaaaagaaattcaccagcatgaggatgcatcacagcagttgaaagttatttcaccataggatagggaaaaacaatcctagagtgagactaattgccttgtgcccagggaaagatagaggatgaatcaatacttcaggtcataggatgatgattaaggtacatgctgtagttgtcttgaccatttgttgcaccatggcggtgtgctgctttgcctgtgtttgccctccaaaatccactatccactcttcttgtcctgccctgtgccctcagataatggacccctatggactgcatcacctggttgggttaggtcaatgggagtcaccggcaggaaaatcgaggcaggatagagagagaggtcagtgtatctcttctctgctccctctctcctttgccattagagttctggcagtagccacgtccttccatgatcatagcacttgtagagcagcctctccatcctagtgccatctctcagggcctttgaaagaaggagttccttctctaactccttcaggccaaagggaggagctgcttcctgctgtcattactcaccaggtgcctcattctctcttatggggtcttttaaccccatctacacctccctaaggaatccaaagttccttcatttgaatcatctgatttgaattcagtttgttgccaggactcagatggatatagcctggaactgtgtaactgaagtacctggcatggagaccaggacaaagaaatctctcaataaatacttgttgaatgaatgtgttccagcttcccttgcagaaagtggcagaaaaatgcaagccagagtgacctgtaccctgtattccatagctgtctttccctatgaatgttaagcttatcaacatcccttcctcctgccaacctacacatgacacaattggcggtgtgtccacctttaatccccaaagcatgcatccccccaccctggcccaaccactcattcaacaagtatttatagagcttcggctgcatagaaagcattttaacaaggtgaggtccaggacattttgtcctgggattatttaggttgccctttgacataacatctatgcaactctatctgatggcaccttgaaagcatctatggaattttttttttttttttgagatggagtctcgctctgtcacccaggctggagtgcaatggtacgatgtccgctcactgtaacctctgcctcttaggttcaagcgattctcctgcctcagcttcccgagtagctgagaatacaggcacctggaccacgcctggctaatttttgtatttttagtagagataaggtttcaccatattggccaggctggtctcgaactcctgaccttgtggtctgcccgcctcagcctcccaaagtgctgggattacaggcgtgagccaccgcgtcaggccacatctgtggaatttcaaggagacactgagttcacctaggccaacattgagtcttggctctgtgggcagcaggccattagaactagattggtgtccaggaaaatgcaggttacactgatgtttacattaaaaggaaaatgattgtgaacaaaaaggaaaaaagacagggagagggaggggaaaggtgtaagtagttacgtctccatgctttttagtagttgccattaataatgtatttctcatatactccatttttatatagctgtctttggtcctctgcatggtttaaaggaaggtttcagagatcaatactcattcgagttgtaaaaattggttttctaccatatctatctttcctcctctctctctcctccacgcgcattctttaggcaatcttatttttggcacaactacctgaacatctgaaataggaatctccatcacaaccttgaagtgaaaccgtttgctcttgtataggtgaaagaaaatgagctctttaaaccaagacagaaaagctgcctttagagctccacatagagtctcctaactgaggcaataggatacgtggagaggaatgggattatctcctccggaaagcatggtttcaacctaatgcagaacacgcaccctcccccttcccctcagttctgcgcaactgctcacaactgtgctgtttaaaaacaaaaaaggagggcaggcctgggaggaggggtgaggcccagttatgcaaatgaggagccaattagcagagacaacaaaggggagatgcccgcctcagagtgccaggtggcagcaaggtgctaacaggaatcgggctgattaaaaccagcgctgtaggaagttttgaaaaatgttttcaacttctgccaaggcacggctaaaagaagcattagcatcgtgcaacatgaggtgactgcctgaacagcccacctgctgctcctcaggcatgggttcttacctctgttgttgaaagcaccgtgtcctcgtcaaggctgagcacggcgtctgtgatgatgttgtcgtagggcagaaaacggctgctcataacctgggaggaagtagaagtaggcagtggggagggaatgagggaaagaggtaacttcagagtcttgttttcaggacaattctcccatcctcacctgcataaagaatgcgctactatcatgtcacccctcaacaccgaaggaatctcatttcccatcaatgcagatgtatttgttcaacaattattgggcacctactgtgtagcagacatcttgcttgtcaaagagggtacaaagataaatcagacatgttccctgtctttgaagagttcatggtctgtagaggagaccaagaagcagatgaccagtctttgcttgatacaaaaaatgccaggagaccacaggatggagcaactagctgtctggaagagcaggtgaaggcctcatagaagtgacatttaagcaggaccctgatgggcagaaagaattcaccaggtatagatagtaatgaagtattaaagacaagacttggcagatgcagaggcactgagcagagaacctgcatcctgacacccactcttcccaaccgaaagagtgaatggatggagaagtgattccaagtgtggacacaaaccacggggagagcagatcactgtagaaagtgctgcttttacaaattacaaacatttacaaattaaaatatgtattagcacagattagaaaaaatatatacacatatattagcagctacagcaatcaaaggtaatattaaagttacaaataacttcattaaaatgagaagtatactgatttaaagaaatatattaggccaggcgtggtggctcatgactgtaatcccagcattttgggaggctgaggtgggtggatcacttgaggccaggagttcaagaccagcctgaccaacatggtgaaaccctgactctactaaaaatacaaaaattagccaggtgtggtggtgcatgcctgtggtcctagctacttgggaggctgaggcaggagaatcacttgaacccgggaggcagaggttacagtgagctgagatggtgccacagcactccagcctgggtgacagagtgagactctgtctcaaaaacaaaaaaagagaagaagaagaagaagaaagaagaaggaggagaaggaggagaaggaggaggaggagaagaaggagaaggagaaggagaaggagaagaagaagaaaaaatattaaataatagcacatatgatccatggatttagaaaaattgtgaaggtggtgtatgcataaagtttgggcagttctggaataaggaaaggtggactacgtgtgcacacacagtggtgtgtgtgtgtgtgtgtgtgtgtgtgtggtgggggctttggagattatggcatcagctggaaaaattgagggtggagaggttaccctgtgatagtcacaacttaaacctttgtgttgaatgtaccatagaggaactaaccataagaatgctgacaccataagaataacattttttgaacatttactgtgtgccaggatatgttgcaagtccttcatatatatcatcgtgtttcatctttataacaaccccattttacagggagggaaactgagatacacaggttaagtatcttgcccaaaacggacccaggattttcccccagatggtgtgactctatagagcaccttggccaccgggctgtatctgaatggaaaggacctcaaaagtgaatttaggaacacatatgccaatcatatgctcatcaccttcttccagaagttatagtaaggatgatgacatcctctctgaattcacacctgccatcaactttgaagagacaaaggccagggaaagaagcaacttaacactgcagacaaagggaaagaggaaaagggaggtacctagccagctgccagagctgcagtctccccaaatctgagtacccctaggagccagctcatctgcaggcctcatctcaaactcggtttctttgccggcgaagctaccagagcacctaggactttaatgcatggacagtggccactctaactcatctccaagagctcaagggacatagctgtagcacacatggcttcaggggttgctcctacacatctgtcaactgggtcaagttttttgttgttgttgttttctttctcaggcttttgaaataaaacacaaagtgatcagcaacctcatagacacagtgctcagaattctcagcctgaagcaatcctcctgatactgtttacatgtccactgactaacgcagaaaccattagctgccagcttagcactgccctgacctttcccttgttaagcccacaggggaaaactgcaaagacaacgcctataaattcaaaacagaatttttcagccaaagcagcaaatatattgcttctaaattcatggagatagagattttaaaatggagaatgaggaagatgtagggcttcttcctcatcatctgcccaaccacaggtcttaaaaggatctgtttcctttttttctgaacctgtttcatcaacagaagtaaaaagcccataagccatccattttcgaattctcatgcagaaatgagaggcttttttcaaacacattgcctcagcgaccttcttaaatggattagcatgagagaaaccaatgtatttacaaagttaaacctgagtgaactgggttttccttgttagttcatttaagaaaggtttagctaccatgtgaaagcccaactcctttaaaacgaacaaacatgttggccaggtacagtggctcccgcctgtaaccccagcactttgggaggcctaggcggtggatcacctgagtttgggagttcgagaccagcctgactaacatggagaaaccccctctctactaaaaacacaaaattagccaggcttggtggcgcatgcctgtagttccagctactgaggaggctgaggcaggagaatcgcttgaacccaggaggcggagattgcagtgagccgatatcatgccattgcactccagcctggacaggcaacaagagcgaaactctgcctcaaaaaaaaaaaaaaaattaacaaacatgcctaggaaatgaccaagactcaagaagtttactgtcttgtagtgtgtgtgtgtggggtggggagggaggtacataagaaatgtacacaaataattatataaaacacaataatagttaagatttattgagtatccacagtgcgcccacacttctcagtacatttatttatgtatctcatataatctgatctttttggctaccttattagttacatattatgactctttccatttattgaaagggggcatcgagacacagaggattagcaacttgctttaagtcacacaaaagtaattttgactttagagcccataatacaaatcataagattatgatgcctcccagaagaggagctaacatttattgaacccttggtgcatgtataatatgcataggactaagcacctgatatggaatggtcttatttaaccctcaaaatgggcccatgtcatagcccaggttttctagaatactgagcctgaagcaagacttaagtgcaaacgcttcactctgaggtgcaatcccagggcactgagagtcagggaaaagacataggaagaacccagcccactggattcagtgcccaaggtggaggcaaggactgaacaaatgccaggggcctgaatatagatgcagctgggaggatctgaggcatcttgtaagagacatctgataaagcccacgagaaaggtactattattatcaccaccattttataaagaaagaaacggggagtttcttttcactgagaatgaaaatataaaatcaatcagtgagtcagagcatgaaaatgctatactacctaaagaaatcagaatggctcccagacagactggattgtgtctgaatatcctgacatatccaaagaaagacattatccaccagaagcagagctggtctccttgacccatggaagcatacaaaacaaagaatcccaaagttcaacattaactgcctgcctctgagtactgttcatggcttcaggcattggaattggaacactgccattcctatgatgggctattctatgggggggatggatataagggcctgcatgaaactgtgcttatggtgagattgatttgtgagagaggcatgtgattattccaacatccaccttttctcattaaatgcttaccaagcagctctctaacaaacaggttgtttgactccagccttatgagagccatggctatatttgtcacattccccactgtgttccaagcctgttacaaggagctcagcacacagtaggcactcataaatggaactgaatagataatgcactgatcatcttgtccttgtgacagttacaattgcattatgtcaaaccatatgaaattgccacttttggtgagtcgatgatgatatcaaatggttcagcctaataaactgattttgtcattctggcgcaaaggtgtgagccactctcttatgacctgaccccttggggactgacaaggaaagttttttagatggcactgcttcaccaatctcaatttcatttagtagtgactatttccttcacaatgcgtaagatctataagtaacaagcagaagctagagaaaaaagagctagctgctctttagtagaagaaatttcaaggaggaggtagcatgcaaacgggggcttaaagaatatatgggaatgttgacaagcagagatgatgagttgaggggtggtcaagacttacaaatggcaaagtcaaaattagaggtaggaagagacacagcgcaattcagctaattataaatgatcaaatgtagtagggggcagggtctgtaggggaaagcaatgagagaaaagattggaaggctggctagggccaggttacacatggcctcaaatgttaattggaagcactagcaaatggagaaaaaggccgggagatgatcagaaagatagttcagctctaggcaaagtgaactggagaacagaagagaggccggctatgtagcactcatgagaatctttacaggcagatgccaaacaaaattaaggtgaaaatgtcctttttaaagtgaatgggagaaagaaacaccattctgatagacatagctcattcagattaatcagccaagcaaaccatcaccaccaccatcagctttatcttcatctttgtcatttacagaaagataactattgccagctcctgactttatttaatcctaacagcaaccctacaaggtatatattattgtttccactttgtagatgaggaaactgaggctcatagaggttaagtatacacacaaggtcacaaagctataaaagagttggtatcaagacccagatttccctgatttgaaagcctattgtggtcaaatctgagaatattctgagaaaagtacagttttagaaaaaataatccaggaacagggagaagatatctagggccaagacccaaagtgccccatggagaaaccaaggctccacagtggttccacatataggtccccttcgagtcttaccttgctctctccttcaatgacgacgacaggcacagcagtggcaggccagcggtgtttggctggtaggggcttgtcacaattccatagaactatgatctgaaagggatggggctcattagatggctggggtaggatgtatttatgtatgcctccaacccaaagcctcttctcagagacagaaagagaaagaggagctggaaatctcagcaagacaaaacggcagacatcaaaactgagttttaaagtgagtccattcccacacaacctcagaacattatcaccccaacaactggagagaggacagaaagagcaaacaaataaacaaacaaacaaacaaacaaaaccaactgtgtccgggaataggggaaagctgcaggaaaaagaattacggtggctggagcttaataaagtggtttcctaaattctgatatcttatgatggtgtgtgagataacaactctgatcaaattaaataaaaatgtatactgagcatctgaacatctgctctgaacttgcactacaccaggcaatgtgggagaaataaaaaaattcaagctagaactaagatgagctcatgttttgcatgctctagaatggttgctgattttatgtgactttataatttccaataaaggcatttagttcaaaaatgcatacttccttattgaattctttccttgtttgtaaaccttcttgtataaactaattcacaaatcagaaaaaccaccgttcaatatgggaggaacactgatttggaaaatattgttaccataggcataatcgtctgctcccaattttataattagtcatagttgctatgaaaagaaaagttgacacttcatgacaccaacaagtctgcttcttctattgaagcttagttgtctgggtcctcccagaggctttttggatgttactttatcattttgacatttaaaaacaaaatcatgtgcttgtatcttctttagagactatgttggtgtatgtatatatactttttaactctataccagtgctaaggtctctctgtaacccatcccttccctgtgcagatttcacttccaagaatttctaagtggatgaaaagggtgtaacgaggcaggatgaatgaaagggagtagcagggtatgatgttagagaagtcccggggagcctggggagcccgggggataacaggtaaggagggcggagtctctggtctggagctggagcaggcaggggcttctctgtcaacttcccgctcacctgggcacagtactgggacttggctgcagccacgagaagcttcaacactggctgggactgagagaccaggggggtcaccgcatggatgactgcagtgaatttggaggggggctttaaacctgaaataaaaaggagagtagagcctaatgaagcgctggaaagcaagacttagaaaattactcctccttgctccgctgcctcatgctggagcaaatgttccctcctggatgatttctcctttgcttcttatgtcctgacaggacagaaacaagatgaaaagctgctggttagctactgcctgagtctagagacctcaataaattccagatcaatgtccacttctaggttcttgctttgacatcctttgcccctcttggtgatgtttctgtgatgtccctttggctttttaggtacccagtgtccaaatacacacaacactcaccacccttcatgtgctgtctctcccatggtatttgcatgtgtctgatttttaattatgtaatgaaagggttctacctgactaatcgtatttcaaataactagctagtgggaaaaaaggtgaaaggaagagcatccagggcctgactgtctaggtctgaatcccagatctaccacttactggtcgggggaccttggaaagattacttaaccctctgtgtttccacagctgggaaacagacctgatagtaacagtgccaaatatggggttatcttgaaaattcagtaagtttgtctgggcacggtggctcacacgtgtgatcccagcaatttgggaggctgaggcgggcagatcacttgagaccagcagttcaagaccggcctggccaacatggtgaaattccgtcactactaaaaatacaaaaattagctgggcatggtggcatttgcctgtagtcccagttatcgggaggctgaagcaggagaattgcttgaactctgaagacagaggttgcagtgagccaagatggtgccgatggtgccactatactccagcctgggcaacatagcaagactccgtcttagaaaaaaaaaaaaaacttaatgcatacaaagcacttagaacaggacttaacaaatgacaagtactcaatatatgtcagcagctaccattatcatcaccctcaccaacattattattttggagaagaagcctccatattcccagaatctcttcttcgtgtagcagtgatatagctgagaaaaaaagtatgtgaggcagacttttgccagttgtgagctctgaagccctaggttaaaaaggatcatagatatgcaaaacaaccactgtcaccaaagagacagaagtgagatggcttccccccaaggagttttcccataagaactcactaagaaattagagacaggttaagagccttttaaaacttcattagtttagacccactaatttggcactttagtggcttaactgcgagcaacacagtgcagggacattcaagttacgctttgatactgatgggataaaggctagaatcagactatatgtgtattacaggattatacaaaggttttgtagagaaaattatatcatccagcagcactttaattgtatgttagaaagaagttaaccttcccaatatctagatacatattcaaagttttgccgagtaagaagaataagcgtgattgagggattgccttttaaacaggaacgacaagtcattgtctttaaattttcctgcaatagtttaagaagcatcatttatacacctctaatgtgctaactccaaaggaagatctaaatattgtacaagaaatatacagaaattcttgtcaaccagtgccttaatctgacaatttctaaattctgttacccaaatgtcaacaatatactgaattagagatggttcccataacaggtttggtttggattaaaaggtgctttgtcactggttgatgcttcaggccatgcatttctttaggtttcatctcatcagtttcaaactaaacatgtacaacttaaaagggtgagggtgttacggagaacaacggcactgaatggaaaatcttgtctttttgctgtatcagcttggaagatgctttcctgtcctaggctttctcaagtttagaactgtaactgatgggaaatgttcatgatgtttctaacatgagagcaactgggggtccaaatacataaatgtctaaggcaataacagtagccggtggtagagatttatccctccgccattcccttttccctactgtgattagactgaaaaccgcttgaaagcagagattgtatcttatttgactttttatttctagtacccagcaatacattagcatagcacatagaaggagcataataaaccttggaaaaatgaataaatttgtgcttgtcacacattcttagttatttctcctttcctcttattcagtttttctttggtaaggaatagagatattgggattgtgaaaaaaaaaattggggagagctctccattttatatatgatgaggcttaaaatgatagctaacccattgccatgttcaaaatgatccataatttggggagcctatttctcaaaaagaaataactctactaaatatgaagtagagctgcacagataagaagtttttctttttttccattttgcaatgctctgctctgtttttgaacttgatatgtcacttataacaaggctctagaaaaagcaatcttcaatgcagggtgttagatggaccccattagagtagaagaataaaggcctttagttctgtatgacatcttcagggtaaacaagggcaactccctggaggaaattcacttacctaaattagcatagtagtaaggaaaatctcccagataagatgaatactgtggtagtacgaacaatcctccaggatgtttgttccatattaaactgttacgtgatatgtgcttgaatattctgtcctgaataatctagaaaataaaacatagcacacagtgaggatgagatcctgatgatatttggaaaggatgatgctcaatccaaattcgaaagatggtggcagtcagagtagtgactctaccctccctcccactttaattctccggataaaaatgtctgcaagacagagagagtaatggagcaatgaaaaagagtgagagaaacatatgaattatagccaatcaaatttcctaattaaacttcagttaaaccataagttctatcttgtctttgtataataatgagtccatgctcattccaaaatagactgtgtggagcagttagtctttccctgatggttaaacttctaagaactaagataggttccaggcccctatcaagaagatctgttctcagagaacaagagaggtcaatgtagacctgtagatgctaaacggaaagcatattcaagacatgacacattctagaagctattgaggttttcagctgttcctttaattcaagaggtagatgtgtatacttgtcatatttcattttcctttcaaagtcaattggaggactttgggtgctggttactgaagtttttctatatttcatcttgaaaagtagtgagttaacaattgcttaaaacatcctacataataggacaagaaccatggcatatgaagactaataatagccaagctagttcattagtttctttggactttgggaccttgcagatcattaaattctacatttagagtcaaacatcctcccatcccgaatcatttgtcagttgaatgtgattagtccactttatagctttctctctgtgactttcaaactcttacaattataccatccactcattagaatatgatttggcaaataattaacttggtacagaattttatgttttcagcaattttttttacattaaaaaaaaaaaagaaaaaaatcctgccgtaagttttaagacatttaagacccaaatcaccattttccaggtctccatttaatgcaatgtgattttaagtacagactattttaaatggagttttattatttgctaaggttattaacaccctcatctcattccacatggtgactagataagtaataaagtgggctacatttatctttgcaaatcttatgtttattttcctaatgacagagaaggaagcaaggaggaaattcaaaagaactcaaatatcttagttcaatgatttctgcatcttatctttcacccagatcaaaactgctaattttatatggctggatagaggtttctaatttggtggagactttaggaacctagtgaaaatatttatttttactttttgtggtacaacagggatatgttaaaatgctgttgtcttggcattaattatgagaaaattgtcatagttgtgaaggactttttacatggttagcaatttcactttgtacaacatttattcctgctttttattatttgtactttccaaacgtactgtctatttatttcctttttatagtttctctttagatcctcctttttttgtttttttcttttcaaatttatgtaccttttaggatgtggtcacttaaataagtttggatatcaagatagaaaataaattgacaatagacagcattataaatcgaacctacagacaaatatcatggaactcacagctgtcacaaaatgggtcatcattcccatcaggtctttggatggtatgcttgtcattgtcatagactatctttttggttcggcatcacaacattgttatcttttaaaattcaaagatatgataataagatatagcactcttctgaaataacaacaagcattttatactgtcttccaacggatcttgacagaaagacataggacaggtacgaaagcagtagcaaatgttgaatttaacgtgggtcaagcaatttgccacctttgtgtattattttcctcatttgtaataaaacaataaaataccacattaattataacaacgtctcagaatttaagaatagctgcctaagttgttatacttaaggcttgatttttgcctttaaaaagaaactcactcctgtgttcgttttctaggcattggtttttccatttattacatagtggtaatagtatagatattacataatacagctatttttacatattaatagtattcatgattcattattcttaatgaccagtttagcaattttttccatgcaaagcaatgaacatatttacgaataaaattttccacatttaggattgattattcttcttcttctttttctttttttgtttttgtttttgtttttgtttttgagacagggtctcattcagttacgcaggctggagtgcagtggtgtggtcatggctctgtgcagcctcaaactcctgggctcaaaggatactcccgcctcagcctcctgagtagctgggaccacaggagagggtcaccacacccagctaattttttatttttattttttgtagagataaggtctcattatgttgctcaggctggactcaaactcctgagctcaagcaatcctttctccccggcctcccaaagtgttgggactacaggtgtgagccaccgctccagaccagaattgattctgtaggaccttgtcaaagggtataaatacttttaaggctattcattagtattgccaagtgtctttctaaaaggtttatatcaacttgccttctaaaagcataaagaaatatggaattcatttcaccatatagaaagatcatttttttccctctgcaattcttcctatcactaccctggatagctcccagaatcttttcatggcacttagtgcttagtctttattgtggtggaagaagacatcacattagaggttggatgcttctttggctataaacaaaatcaatacacacacacacatacacaaacagataatacaagactttttttgttatggtcctagatggccccctcgataaggacaatatttctaattgatgtgaattcaaagggaagaatgacaggctccttattttacttttatgtatcctctgttttccaaataatggacaattggttataggttaaagtcattctatgtagcccttcatcttttaaccagagcactgtagcctaagatacacgatgccaccatatgccacctcacttgaagccagatcaattgtctatttccattaccccattgatttttaaatatcattgtatgatagcatcagcaatactatggttcgtatgtgcatgattagataactgaggaggaaaatgaagcatacttcattaaaactccactaactatataccttcctagctaccactggctcttttcacatattatcataatctcaggcactttctttcactcatcttgattatgactaagctccaatgattcaatccttagtgcaggttattgtgcaatattctgacaaataatggaatccatgaaggagcactgtttttgcagtgttttttcattgtcctcattgttagttctcaattttcacaaaagtactgagctctacagagcctagtttgattaaatagctccttattaccaagatgcagcattagagaatttcaatcaaactggaaaaactaaaagaatcctagacagagttctgtacaatgaaacgtactaacaacctgaccctggcattgaagagaaaatgagatgtcctgttttcaactgagtctaagcactctacctacaactctagggctcataattgctgaagaccccataatcccattcccatggcttagaatataccaagcaaggagaaagacctagagtctgagtacagaacatccttagcccaggatcttcaactctatgctgtaactgtgagtaactatgaattattctcgtgccttagtagctccagcagtgactaaatgaagtatattatctaagttctaagccaagttcacatctttgatacgtgatacttaaattgttcttataaacacatttgctgtgttatttgtatctgtggatggcattttcttctatttcccctgattttttgattatgttgaattctggggtaatctgagttatgaagtattttgggaaactgggtagtacctgtcatgcaacttggttgagaggtcaaactgttacaatccaatcttggaactatataaagagatttgacagttgctataaattcgaatgaagtgtatggtttttagtgtttaaaaaaaccccaaaactgtgttgctaaaaaaaaataataataatacatggtttaaatacaaagggaaaaggccttttcaggttcagagatgaaaacagcttgatcttattttgatcctattctgatgaatgtaagacattcaactgttacaatagaaaaattgagaactgctaacttaataggtgagagaccatattcatgcaataaaccatatgcaaaagacatgtaattaatgagataccatctttcatctggcaaatcagcaaagtgatagatgtgtgtgttttaattatggatctgtaagactgacaagagcacagcaaaagagagtcacgcccagacagcttgtgagattctaggtggatataatgtttttggataataatttggcaaaatatattataagccttagaaatgcctaggctctttggctcattaaaatcacttcagggattccatcctaaagaaatagagatgtagtttaagatacatgtagaaagtcattgcttagataaagatatagttatctataaaaaataaaaagaacattaatagtaaataatggcatattggtttaagtaaatagaagttcacaataggatgcataatagagtaaaaaaaattaaaacactggaatgtgctctggatgtattagaggtaaacaactaataggatagaattgaaaggccagaaacaacccaaagatacataaaaacgtcatgagaaaacactgaagaaagaaatgtattggggctgggcatggtggctcatgcctgtaatcccagcactttgggaggccgaggcaggcagatcacttgaggtcaggggttggagagcagcctggccaacatggtgaaaccccatctccatggcgcatgcttgtaatcctagctacttgggaggctgaggcctcagaaatgcttgaacctgggaggtggaggttgcatgagctgagatggtgccactgtactccagcctgggggacagggtgagactctgtctcaaaaaaaaaaaaaaaaaaaaaaaaaaaaaaatcttaacatttggcatattatttgaaacggacttcaaattcaaggaatttatcctaaggaagtaatattgaatctgcacaataatttgaccttgagatgatttactgcaatgatgtacataaaggaaaaaagccagaaacaactggaatctacccaaattggggattaatttaataattagatgatatcataaatggaatatcatatagtcattaaatggagaaaaaatgtaataacatgagaaaatattaacattattaagcagaaaaacaggttacaatgcaagtatataaagactcctttttaaaattaaaagtacaacaaattttaaatttacatataaaaatgaatatatatgtttgtggggatatatatatcaatagtggttttacatgaatgaattattttatattttatgctttaagtgttttctattagtttctaaaatgaatgtatacttctttaataataactcctttaatcccaccaatttgggtagtcgaggcaggaggactgcctgagccaggagttcaagaccactctgggcaacataacgagaccttgtctccacaaaaaatgaaaaattagccaggcacagtagctcgcgcccatggtcccagctactcagaagactgaggtgggaggattgcttaaggtcattccagcctggtgacagagtgagatcctgtctaaaaaaaaaaaagaaaggcactctgcactccaaaaagggagaaacaataacattcaacattctttaagaagggcctaggaaggatcttagatggaggacaggattaaaaaagcaaagggtaactctattagctactgtgaacagaggtaacaactcaattgattttaattgaggagattgcttttggagggataaaagtttgcttgcaggaaggaagcccttggaagtcattatgatcctgtccccttcatgggaatgggcctgggtcttaaacagccccttttacccagttccaggatgaaaaaaatacacactatgcctaagagaacactgaccagagctcgccctagggtgggagcaggagcccaagctcagcatggggtggataaatgccctggtgtgcctggagcatgaccagcactggctctgatagtcaggatggcaagaaaacagcgatgtggaccaagtagggtgacttcagtttcttggtattactcagatttctcagtgtaggttccatattacattagcttttagagcagtcatcactcttccagagtgaattctccaaaaggaaggccacaatgcccccacctcattttgggacacctcagaatcacctcaacgaagatctctgctctcctttcttcaagcttgtaatgcatgcgtgtgcagtttcctgaatcttttcctagctctttgtgctacttcggtgtagcctcaggccaatgctatctgctctatttccaaaggttttaatcatctccatgcttcctttttctttttccgtcctgccttaaaaaaaaagcaacttgaggacgggcgcccatctgcctaaaagattttctgctttcacaaatttaacactttctgtgccacatgggtatgatcctgattctcctcttaacacaactttgccacattgacgctggttggctggcttgcctaagtcttgagaattctgctgtcccgcaatgccattggactgtggtgcccagaaaactactcatatttttggaatggtagaggatttgcccttacttggccattatatatatttttctttttttttttttttttttttgaggtggagttttgctcttgttgcccaggctggagtataatggtgcaatctcagctgactgcaacctccacctcccaggttcaagatattctcctgcctcagcctcccgagtagctgggattacaagcgtgtgccaccatgcctggctaattttttgtatttttagtagagacgaggtttcaccatgttggccaggtcttgaactcctgaactcaggtgatgcacctgcctcagcttctcaaagtgctgagattacaggagtgagccgctgtgccaagccattaaatatttttttctaaatgaactccagaaatatgtcttcgaaggatgccattgagtgtaaatgacaagacagtcatgacccacatatccctgaaatgatgtaagacagagtcaatctctgtgtcaataagtataatttctccccatgtaggttttcctttgtggagtttgtcaggaatgagagtattttcttggccatggcaaagcaggtaaaagaggttaaccaatatatccaagtacaggaatctggttttgccccactggaccaatcacacatccctaatagcaaaacagaaggctgagagaagtgtataaaggaccattattcaagcccaagagccaagtggtctcacttacctctagtgtagttaatacaatcttctcaactgaagaaaaataagcctcccacaagaattgtgtctgctgtctaagtgctaggattttatcctgatgaatagacctgattgtagaaggaatctgtaacacaaggtgaacacataggaattataactgtaaaacaaagagatgcacttgatcaaaataacccaactgggttaggcttttattcttcatagcatttggcttctagcatatagatctactaaaaatcatcaattcctaagttgaaatgaccttaagaagtgtcagctgcaaagagcacttactgggaatccaccccaatggcctttgatgtatgaaagttacagttcacctctaagattcagtagcaccttatcagttgcttaggttagtctatagtcacaattgctgtttccagaaatccttgaccttgcacatgaacaaccaaattttatagaggggtaactataggtcttggggaaaggccagaagactttatctcccaagcacttctatgattggtcaccccaggaactataaaatatctataaaaggactttttagagaatgtctatgagccttcccatccaatctgaagctagggtcagtcacttttatgtgcacataccttctacctcacctttgagcctttctgctccctatatctctctttctgccttcagcctttacccaagtctaactggatctctcaattgttcatatatgattagccatcactgctctcttccagggtatacaattttaaaggaaggacctatatcttgttatcctgctacacattttcaggttagcagagtggattttatatagtagttattaagaaataggaggtgaatataaccatctgaagccaccacagggacgtcattatttttaatggtagtataactgaatggtcaggcacaggggcacagaagtcagaaagatcaaggaaggagtgttgcctctagcagcatttactacctgtgctttcttgaatgagttagctgatttctcaaagactccacttctttacttataaagtggggataaagtactaaggttttaatgatgattatataagtgcttagcacagtgcctaaaacatggaaaacttaattaatgtaacatcactactattatcattattggtatcagggtgatgctattaaaagctggatcaattgcttaatgtttgcaagggaacctacttgggtctggagctctgaaatgtacttcctgagtctggtaagttttctgggcttgttccctattttcacctacagttcaaggtctatttcatttacggagtctatagtctttagggaagattccttgtgatttgcaattgcccttttgtgctcacctctttctgcatgcttgcctccataacatatgactaatccgacagatatgggagtctgagcaagaaggagaaatgctccgttagctgctttaataggaaagtcacccatggcatttgactaagactgtaacagagtttccattggaggggaaggaagtggtagcacattttttaattcagcactccccttaggaggagcaataaaatagcttcacagtaagaacagaaggaaaagctcacttggtttgacaatgtccaaaaccagatactaaatctgtgtcccaaagtgtatacctggatttgcaacactgaaaaaacagaggcaacatgtaaaggagaaatactggcaggcaaacattagcctgtaatcagagcccaaggtcaaatggaaataaaacattctttgagaaggtagacaaatcatttatatcatagaacctttatcagtgcaaggaaacttatttttagttactcactgagaaagttacctagatggccaaagaaagattagaaaaaaactatcctgttcaattttcataatcataccctcttctaaatgtcaagaggtaactgctaagagttatataggttggcatcactgttttatcgtagccacaaggaaacagtctattagaaaaatgcctaaggccgggcgcggtggctcagcctgtaatcccagcactttgggaggccgaggcaggcggatcacgagttcaggagttcaagaccggcctggccaatatggtgaaaccccatctctactaaaaatacaaaaattagctgggcatggtggtgtgcacctataggcccagctactcggaaggctgaggcagaagaattgcttgaactgggaggcagaagttgcagtgagctgagattgcaccgctgcactccagcctgggtgacagagcaagactgtcttaaaaaaaaaaaagaaaagaaaagaaaagaaaaatgcctaaagctgtcattgctatatagtctccagaaaattgagtctgctgtggttatgaaaggagaaaaggaatatcacagactcacctaccaatgctgttcccctctcttaaataacatgcatcttcatcttactacatcaagtgcaatgtattctaccggcttgtgatatgatacaagtgtctgacagcactctgcaaagtgctctggaagacaactccaattgattgaaaagacagagttccaagttttaatggcacttggctattggttattaatctgcttgtcctgagagacaggtatgggaaagtgataaattaattccaatttggctggattgttttggaagttgccgagctcaatgaagtcttaataaaaggtcatgtatggtagcaaaacaaatggaatgcaccagaatagatacaagaaagtcacattaagctctcttggtgacatgatgacaagaatatatgcaaataaaaacatcccagctgttctaaaacaggaaataaaaaattgtaacataacaaaaaaacatttcccagagcagacatttgggctgggtgccaactctttaaaaccattgttaatgatagtacacagttgctgctcaatatggaggcagctgtgcaaagacagactgaatatgagaggggaaaaacaccagcaagtctgggtgggtgggggtgacaaaaatcaaaatctttagagtcaagccaaaaagttgcttcagaaggtgaaatgcccatcaagtttggtgaaatggtagaaactggacaagtggctgggcgcgctggctcacgcctgtaatcccagcactttgggaggctgaggcaggtggatcacgaggtcaggagttcaagaccagcctggccaacatggtgaaacaccatctctactaaaaatacaaaaattagctgagtgtggtggcaggcacttgtaatcccagctactcgggaggctgaggcagaagaatcgcttaaacccgggaggtggaggttgcagtgagctgagatcatgccatggcactccagcttgagtgacagagcgagactccatctcaaaaaaaaaaaagaaagaaactgcacaaccacaattaagtatcctaaaatgcgctccataccaaagacaaactttcaatttgttcacatcaaattcatgggagcattggtatataaaaggaaaattatgggtggtgttttttattccctttatttctcaaatttcttttaatgatcatgtattatttttaaaataacatttgaaaaaggaagaaaaaaggctacatggacaagcacaacatgcatcactcttgtttggcttttcatgaataaatgattttagcatacactatctctgcatggggaaaactcttcctcagtgtttctgcaaggacttcttttccttaaggaatcacagtgggaaatcattggcataaaagtggccctttcacaaaaactccagacccctttctcaatgaacacctaagaaattaagttgtattcagggcagaataacttattcccccaaaaacagattctgtcacattcctcctttgtttctgagataatagggactatggagatcacaaactgagtgccagacagaagtaatgtttcaggagctgtggtcactttagtttgcttaacccatgggtctctcagttacagttagttcatttgttattttagggaaagtgctgtattacttcagcagtcagctagcagactgggcagcagcacagaaggagaatcaacaacagacttaagaggccaggcgcggtggctcacacctgtaattccagcactttgggaggctgagatgggtgaatcacctgaggttagaagttcgagaacagcatgaccaacatggtgaaatcccatctctactacaaatacaaaaattagccaggcgtggtggtgtgcacctgtattcccagctcctcgggaggctgaggcaggagaatcgcttgaacctgggaggcagaggttgcagtgagcagagatcacaccactgcactccagcctgggcgacagagtgagactccatctcaaaaaacacaaacacacacacatacacacacacagacttagaaactcaatttaatgaatatccaaaaactaaaagggcaaagacattaaaaaaaattctacaaatatttgtggtaattcaaagataaagtgtatggtacaacaaaagaaaaacattaaagttctagaattttaggagaaaagagcacggcaacttgtgttgatcctaaaatatgaatatacaaagggctttagaaatccttagtaatttaaaaaaaaataatacatgatcattcctgccctcagatttttctgagtatcgtatccccctccctaggcagctcttgagcaattcaaacttttattaggggctgctcatttaaatataaatcctaaagataacactcgctcagacacccagactggatcatttgaggaacgataacactaattacaagaacaagccctagagacctctctctttctgaaaattaatctgaaggcaagtgcagaaacagaggaaaagaatatgaaacagtagggtagaataaaaactctctggtaatatttctaaaaattctggttattgaaaggggtggagatccacttcttcttgaaaatcaaagctcccattctttacctgcaacttcttttcagaatatattctggggacctggggagattttgttggaaagtgaacaatgtcatattaaatgacttcatattcaccatgacacaggtaattttctcctgataagatttcttttatagagctgaccttttggattcatcttctttgaaagtttggacgggggcagcaataatctgctgatgtgttgaaggccacagccccttccttacctgtaataacaatctctcatcgcctatgacggcagcttggttccaattaatcacttcagagaatggcaactcccatccattgctgagcatcacagggacgcaggcagcctgagcaaaaaaggggacttcgtgaatgtgaggaaagcgacagcagaagctgttccaatcagaggtgaaatcagtacaaactcaatgactggcatttttgacactgcatgaatcctggactgcctaggccagaaggaaaggaagcttttatgagttatcaagtcacacgaaggttgtacgtatccagactagattttaatatttgcaagtcttgccctagaatgctaaaaccccatttctattctagtacatggtttggctgaccttacttccatagagacgactggccttgctggagaagtttttattgacgtaacaaaagctcgcaccaacaaaatctgagtatagaaccaaccttgaatataaacagtctggtcaacgtaactcccacaagtccacgtgcaaagtggtttaccccaatgtcatgagcaacaaagagcagaatgaagctcagcattcctaggcagcagttcgtggacttaaccagtatagagtgttcacatttcccttgctctgcaaacacccaaaccagaactttgttcctttcagtgtggagtgatctaaaccacagtcataccaatttatggtctgtgccgggaaataaacagccaagaaacactaggttaatgacaaaatactgattccaaataactcataatccaaatcagagaacaatttttctttatgcagcatcccaggaggctacaagaacattagtgatggcatgctatgcagaacacacacagagagcaacttggaaaagacattccagagaaggaagctcttctgttggagggcatgacagaatgatttgcagttaagatggcagagataagaagttatgaggcactgcagcaaaagcacagatttaggcatggtgcagggcaagaggaggaaagaacatagtagcaaagggtcaaggaatggaggatgagagaggttgagggcatgctttctctctgcaatcaaagaaggctggttgcaacttccaggtgggaaatgtggatgactgtctcaagaggacatttctgcagagtgaggttgatgagctgagaaactcccaccacaaaggctccagggctggagccaggacctctgaactgcagagccttggaagagctggatcatctgagtagtaccaccatgctggggatcattctcaaaattgaaaggaactgagagacaatgaagatgcaggcagaaaagacaattttgcttttagagagtaccacgaataaagggaaagtgtagggctgctttttagagtccagctaggctgcctggtaggccaagctggcaattagatttgccttctgtttctaaacatgacccagaagaatccaccatttaatttcttacatctaaaattactgagtaaatcctccctccacccctcacttgtcaaaaatgttttagattttcttgaaaatattttcagatcctcaagggaaaccacaccttctctttagctatcccaggagaggtgataatgttaaacccacttaatctggcttcggtcctcagccctattctgggaaggctccagggcctcttacctgcaaagcctccaggaatctgaaggacccaagcctgcgaccacgaggaaccagacagaaagtggcattgtgcagcatttcccgataatcatacctagaaagagaagaggagtaaacagcaaatgaagactcattgcgaatgtggggatattgaccataggtgggcgcccatgtgcatgaatttacgcaaagcaactcgggaaagccaccagcaggcagctctcacttttccattttgaggaaggaggttgggttgctgcatgaagagtaaacatgaatcatcatgttggacaaagcaattaggatcccttttgcaagcagtatatataaagacaagtctgatcgttctggcaacaatttggtttgcccagtctttgcttccaaaatcagatttttaagtcttgataaaatatgttgccccatagtcttaaaaagaagaagagaaaattactggtgcttctccttctcctttaacaatacggcattcagcaaaactaagactgttcttgttccccaccccttcaaaaccatgctattaaaaactattcagaaaacctcaatcacaggcacaaaacaacatttgtcttctctttcaagatggagtttctacacttaaccaagaacgttcagttacccaggaaaaatattcctgtttaagaatggctgacataactcacaggagaaagaggaggtgagagagaaggatgctagcctaagaaagggaaagaaagaataacgagaaaagaaaagaaaaaaaaaaaacctgaactaggagggggtacaggaaactggtctacagaagagatgaatttattttactcaaataccatttaatgatattacattgcttttgcttttcgaaaaaacatacaaaatatgagtgttacctgtttctttatgccagtgaagtttaagaaagataaaaagcatttcattttgtttaggactgtcacttttaaagtgattaccacaaacacattcctacacaggcagtttcaagtacattatgagtttaagaaaacttgggaaagtagagatggctcatgtcctgtaaaggccccgattcttagagccaagatgaaatcactctcatttttcaagagcttccaatgctgagcagacaggtgtgactttgacagtagcatatgtcaccaccactttctgactctaatagtctaatttaatcatagcctaaaggcactgaattcttccctcttctttttgggtatattggtatatacatttatatttttaaagtccacatctatttttatattctcatacaaactaggcatacgggagtaagccaattttcaattataaacccgccattaagaagagacatcatgcaaaggaccatttgcttaaacaagcgtgtacaactaatttgcacaagaaaaggtcaccgtgaatggattaagattatctccattgagagtaaaaattttctaaaacccttgctgcattaattaaattgcaaaatagacttcaaagtaaaaaagatttttaagaaggcttgaatttagttaaatataaaaaaaaaataaattagatggtagtgatttcttcatcctcaccaaacacaggaaaatggttgacaaatatcttcaagttcaaatgttgataatgttttaatctctgcctaatagatggagcagagagaaatatgcacacacacacacactcacaaaaatatatgcataaagtttaagctgatttttttttaatacagaaaggtcgaatatacttcagactacagcaaggtttaataagtacccagaatagaaacccctgagggactagcacagaaggtcccacattctcatcattagcctactaaaaatgtaaaatcctattaatgttctgcattgtaacaagtttcaaagttcctagttgcagaatttactttagggaatgtgtggaggaagaggaagggcagaaaacttataggaaaaattcaaatgacagttatagtgggttgcttaaatggttacatagaaggactatttgctgatatagcaagtaagattgacatgatcgaagcttgtattccttcacataataggtaataggagctgtgggaagaatacccttgcaggagttaggaaaccactaggtagctgtgagacttaaaaaacccatgaattttctatctgtttcctcatctgcaaaatgaactacttgggctagatgactatagattcagttttaatacttgattactctttatcttatcatttttgggtaagaaagaggaatgtcctttgagaatatcccactgcttaggtgtccataccattatatgtatgtgtatatgtgcacaattccatacccatatatgtgtgtatatgtatatacatacgtatctgttcatatgtatgcagtgcatgtctaacatatgtgtgtattcacatagaggctcatacagaacatgtacactcataccttagaacaatgattttcattcagatttctatgcatgctcagcctgtgaaccagcctctctattctactctctggacagtcaatctatgaattactaacatgttctacctgaaggaagaatgatgccccacaagtgggcagacaactattctagtttgaccacgtgcttgatcctctcctactcagcccattgtgatgctctttcacactgcacatcaacctccttgtagatgcttaaatccactcatttattcattcattctttcaagaaatactatgtttcagacactgtcccatttcaacagatagagtccagagaaggtcttctctagttgctggagctaccaaagaagcacctgacaatgagaaaatgctgatgagatgagaatttaagatataaacatctcctgggagtatttgcattataagaggagattatagaaggccgacctttcagaagatacacaaagaagtctgtggccactctccccagcaaaacagcaatttagtaacaatcataaaaacattttaagtctctgagaattgtcctaaggggataatgacaaatagagaaacagtcacccaagaaaatctaccaaatcttggcaagaaccatgagagtctgtggcatctggtccctgacctgttccatgaccaacccctactagctctgccttacaggagctttactctggggcagtgcagtcaggaaggctgggctctccatccccccaggtcccatcaagaaagtgaaaaagagcctacagaaagagagaaccaccgggcatggtggttcacacctgtaatcccagcactttgggaggcccaggcaggcagatcacctgatgtcaggagattgaaaccagtctggccaacatggtgtaacctcaactctactaaaaatacaaaattagctgggcatggtagcacatgcctgtaatctcagctacttgggaggctgaggaagaagaatcacttgaaactgggaggtggaggttgcagtgagccaagatagtgccattgtactccagcctgggcaacaagagcgaaactctatctcaaaaagaaaaaaaaaaaaaagaaagagagaacgtatttgccaatcatatatgataagggactttcatctagaatacataaagaactcttctgactcaacaataaaaagataaataatcaaactttaaaagaggctaaggatttgaataaacatttttccaaagaagacacacaaagtgctgctaaacacatgaaaatatattcaacatcaatagtcactagggaaaagcaaatcataactacaatgaatgagataccactttacacccactgggatggctataagcaaaatgacagatgagagcaagtgctgatgaggatgtaaagagattagaacccttcatacatttctagcaggaaggtaaaacggtgcagccacttcgaaaaatagtttggcagttccttttcaaactaaaaatggacttaccatatgacccagtaattgcactcttgggcatgtatcccagagaaatggaaacttattttcacgcagaaacttgtccacaaatgttcacagcagtttgtctgtaataaccttaaactggaaactacccaaatgtccttcaatgtgtgaatgattcaacaaattgtggtacatccatagcctacaatccttctcagcaataaagtgggacaaactattgatacacacgacaacttcaaggaaattatgctgcattaaaaagtcaccctcgaaagtgtacatactgttgaatcctttctatatgacattcatgaaatcacatagttacagggataaagaacacttagaggttgccattggttggggggaggaggaaagacagggagacttgagaggtcaaatggggggacacagtgttttaagatggactaattctccctcgtttcttatgtttagaaatgtgaatcacataatcacacactacttaaaagaaacatatgatatcctaagcaagaaggtaagtaggtgagggagacaactaaccccagataatttgccactctaataaatggttttgctacccttttcagatgggcattaagttccccacgtgtaggtaaagaaggacaaaaggtagaagaattttcacaaacgactacaaagaaaaatgcaataaaaatgacatgaccttgaatttaacctagacactagtaccactctatggccataatcattttatacttaaagttgtattgaacaatgtatgggatgcaccccatttaaaatggactatgcaataatgcacaattgaagtcctgcccctctgtaggaaacacatttttgctggcagccattctgtgcaactgggaaagatgggggagtgtagcatagagcaggggttctcaaagtgtgttcttccaatcagtggcaacatctgcatcatctgggaacttggtagaaatgcaaattctcagcctcacccaaacctgctgaatcagaaactctgggggaagagcccagaattctgtgttttaacaagccctctggataattatgatgcaccctaaattttcagaaccactggcaccatagttaagagcttagtaattaaaagcttagtggttaggcagcttcagacacagcaaaacctgggttcgaattccagcttttcaatttataaactgagtaatcttgagaaagttatttaatttgtttaatcctagtttcttggttggcaaaatggggataatacttatactgtgaggattaagtgatacattttaaccaaagcacgagcatattataagcaaaccataaaaggtagctattatcattatgactgaaggaagataacagaacataatggaaaacacagccagcttcaagttagaaaatctgggctaaggaatttgggttcttgatctaccacttcctgtgtaaccccagcaaatcattcaacttctccaaacctcaaagttttgaagatcaaatgaaatcatgtacattgaatataaatggcaaagcactatgcaattgcaagttattatggtaaattatatcagaataagagggatataaacatttttaaaacccctagtaacaattaaaaagaatgaaaactacaccagtatcccaaagacagagccaagagacaaatgtggaacagaccctttaaagtaaaatggaaacagaagctgtgaatcacaacagaacagcagcttctaattgaaggcttttgccttattatcaaaagctacatagacaaggatgttgctggtgcactgtgctcacaggtcctcctgtggctcccacaatccctctgtagcacgcatatttgccaagtgaacctgctttttgctaaccaaagacgatagggaagaaacaagtgatccagcctctcatctctgtactcacacaattctagcctccccatgatgttgtcacagtttgtctcaagtatttattcataaagtaacttaacatctacagctgatctactccctccagtccccatcctcataagtaattaatctttccttatacacaagtttgaataatatcccttaagaaaaaaagaaagaaagaaaataaaaataatttatgactgttgtagttctctaaagtgcatggggatgagagaaatgaaattaacatcctttgagcacctccttgcgcctttttcattcattcaccaagcattagttgaatgtctaccatgtgtcaggcactcttcagggagctcactgtccagaataaacaacatgtgttatcaaatgatgattagtcagcgagaggagtgctaggattggacatgaggtagaggtgggtgttatacagagaagagaagcaatggccacatgtaggcagggaggcctcctggaggaagtgagaccctgagctaaatcttaaaggatgtacaagaagcaaccaggcacaggggtaagaggaggtgatgggaattcctgggggtagagatagcatagcaggaacaaaggcaccaaggtgagagaaaccacccagtttggggaggggaaggtatgggggtgtgggctgctgttactggtgggttgccactaggaaggctttctatgacatctcctagagctcagagatgatcccttgcaggtgactggggtgtcactgaagggcttgagcagaagaatgacatggtaccaatggtgttctcaggacttcatataacccaatttcatagagaagcaattaagtttggagacctcaaaaacccttccaatgcaggtcacagctaggaccaaccagcctgtgttccaactcctggatttctcattctaaatcccattttctttccattacatcacattgcctccttggtcagcccatacaacatgcagtgtctaaaactgacatgtcttatgaagccaggtcctaagcagttcacctagtttcaagcatgggctattcgttgccaatttaaaagggctgtttctctcccattcaaaacttcaccccagatcactaccaggagctcagtttaagaaggtactctgtcatctatttactaaccatgttgccttagacccttccttggcctttaaaggtttaacagtttaaaatttcaattactattattattattattattattattattattttgagacaagatcttgctctgtcacccaggctgcagtgcagtggtgagatcacagttcactgcagccccgacctcctgggctcaggcaatcctcctgtctcagcctcctgagtaggtgggactacaggcatgtaccaccatgtcaagctaatttttaaactttttgtagagatggggtctcactttgttgcccaggctggtcttgaactcctgggctcaagtgatcctcctacctcagcctctcaaagtggtgggattacaggagtgagccaccatacctggcctaaaatttcagttatttttgagaaaactgaagtttacagcatgcagtcgtacggaattgcccaaggcaaagatttgaactgagaaacatatataagtgggaaccaatcttttagctggaaaatgggtccaactggccactgttccatctcaattaggagacttgaaaacatagaatatggaaaagtataggtccctggtgtctttgagaattctctggacttaaggagccacagtttctccatgacacctactcacacagagtctctgtgcacacaaatgagctgctatagtacaaatgagctatgcaaatgtgcagtgctaggctctgggactggctgaccaggttggctgcagcttcagggatgcttggcgtccccaagcaggaaggcactcgctatttggaggtggtacaattccttactcaagacagttttttgccttgagcattgcctgctgttagaactgccacaccactccccacctccccagtcatgccaaggattaagaatttatttccttgtgacgctcctcagtctgaggctgctgatcccaagctgtccaccgcagagagcagtgcgtggctaaaaccagggccaggaatttatattcaccctttcacacttcttggctttccacagaagagagtctccttttcatgtcctcttaaaatccatttcagcatagggaagggaggcagataacattttgtgggctggggctgaggcatgaaacccctatgggaggcattcactctcatatccatgatctcatgacagcctcacaaccactggggacgtggggaaagatacacctgtctttcacagggatgagggagtcagaagagtccttggactcaaacatcttgactgaacacgccaggtcataatctcttatcaactctaaactccaccccccatccttaggttaaatgtctactgacagttcagaaccttaaacttagcccaagtggtaattgctacctgtgtatattaatgaacacaacatgtaccaggtgtagctcatacttcaagaggggtaaaagatgaccatctgaattcctgctcattaaataacagctcaatggctaatatataaaagtaagtaaaaaaaaaaaataaataaaagatagctattaataacaactttttaaaaactttttttaaattttaattttttatagagacgagtcttgctatgttgcccaggctggtcttgaactcctggcctcaagtgatcctcccacatccttcccagtccccaaagtattgagatgacaggcatgagccaccatgcctggccagatataaattataataacaacaatacctccactttttaagcatttcctgtgggtggggcactgagctgcacaatctgtaatctttactgtgccttatctttaccaccatcatggagaataggtgctactgaccccagtttacagatgatgaagtaaagtgtcacaggttttgttcggtttgtgcaaggaggatgggatccacgaccagctctgtcatctctcaacctacctaggaggaaagagtaacgaggtgccagcaaaggtgaaaataagagacatttaatacatcgtgcccatgacattaatctcaggaagctttctgaaagaggagaggttttgcagcaccagctttttcttttttcccccctttgagcagagtcttcttgctctgttgctcaggctggagtgcagtggcatgatctcagctcactaaaacctctgcctcctgggttcaagtgattcttgtgcctcagactcccaagtaggtgggactacaggtgtgtgccaccatgctcagttaatttttgtatttttagtagagatggggtttcatcatgttggtcaggctggtcttgaactcctggcctcaagtgatacacctgcctcggcctcccaaagtgttgggattataggcgtgagccatcgtgcctggccagcaccagcttttatacacagcaatacccacttccaaaactcttctcagagaaatgcaattccaagacacatgggcctaaattctctggttcaaaacaaaacgtttttgaaaatgctaaataaagggctacctgagtacagtggcagggagggggtgcagggggaaaagaggggattaacaataaaagagccagcagcaacagtgaactcagatggataaatgggtccagaagagtcacacacaggcccaatggtgatggggaagcctgaggtcattatcttaccattaactacctttcgccaggctctaagccaatgggactggttaagtggaatggagccaggaagtatggacagcagcccgagaagaccaggataggggtgggcagcgcagtgtgtctgttctaagggtgtcagctccccacctaggacaatctgagtcccaggaggctggctgtggagggagcacttcttccctacatgcccctctttccttctttttcttaacttccactcctgctgcctagaggaaggcttccctgatccctggagtttgggaaccctgtgctaactctctattgctcactctgtattaagttgcccatttttctcatttccttcccctggattccgggacacaggaccttggtcctactttctgttgacccaacaactaccttaagggccggcctactgtaactactcaaaaaaagagttgttaaatgaatgtaaggtgctcagtgtccaccaatttgcattaaagtgtacaggggctatggaagcaagaagataacaaagataagatgcaagcccttcattacaacaatgtccactttaacaaacacatgcccaactcttgatttatgctgggttcttccaagaatgagttcattcctatgcttacaccaagcccaatttacttggggaatgaaaaatcgtgttatttatttagtcttccttttgtacattttaaaatcccttctctgtttttatttctacaggtctggcagcttgttaaaaatgtcattttctccctgcacgctgatgagggtagaaaatttgtgtttcaccagccctgacaaatagcattatttgtaaatcaagttaaatgcatgcacagtgcggttcaaactgaaccttctcctggccttcctccatgtctgaactgaagaataaaaagctgtagaacctcctcatggcttctgcaatgacaaaccctgcaccagtccaaaaagcaatgactccctccctctgcacagaaaactgagctcgaaccaatgtctgaccacttcccttcttgatccaagatatcctttccagcaaggccagcctggatcaggcctcggattaggaggatgtttggcattcctactgttctcacccccagggcaggcactgtgcagagtctgtcccgtgacctgcattcttgtcagtgtttaatccttttgtctggcccctgcacttaagtggttataaaatatcttgagaatccaatgacagtttgtggaatgtcagctgatgccaccaacctcaccttcccattttctctcccactgttgcatcactagcctctgccttgtgactttgacagtcagggctgccacctcactcctgagcctttggtaccgaatacacaaacaagacctcagaactctgtgtaggctgatatagcacattcacaaaaaattctagaacacccaacttactatgaacgctgcatgaagctagttgtctatggaaagtttaatctttcccgtctgggtatgtgaatgcataaatgtagagatacatgggtgtatccatgggacataacatttgggttatggttgaagatttgatgccacatattattgatttacaggaatatctttgcatgaaggttgagtccttagggattagagaggcccacaagtctagattctgccatttccttaggcagaagtacaacagtaccctggggaagatggtctgtggagctgaatcacctctccctcctcctcctccagctggccatgcttcccacagttcctttgagaagcagacagagccagctagctccctggcactctcattctggaaagaggctgtgggacagaaagaaaatttaagcactggattgaggagaggtggaccagatggcccaaaggatgccttcatgccctgatatttactcactggacaaaggagtattgagcaggccctacatgtcaggtagcactctgagcactgggacgccatgaagcaagagtactccaggagctgcccattcatggattttgcaattcagtgacagccagagtctcctcacacccttcttcctatacctccttaatcccattcctccttcagctcaagcgtgcatgaacagagcaacagaaaccatactctggttcttactagttttaaacagaatgagttcaatcgtatcttcctgcagtccatagtctatagagcagccaaagacaactttcaaatgtcacccccccagtctgaacaccctccagtggctcctcctggcacttagaataataatcatgccctacaccttggccgactgggtcccatgagaactggcctctgcccacatctctgactgccccatcctcagtcaccatctacagctacaaagtccggctctcaatttcttgacagagaatgctaacttctatctcttgcacttgcacttgctgtgccctctgcctggaattcttctccaggatgtctctcaagctgcctataagcattcaaatagccccttctcagagaggccagcacagaccaacctgtgctcctggcactctctttctgttgccctgtttcatctccatcctggcatttaccaaggtcagaattcacacatgtatttgttttactggcttaccttctttctccccaaatgtaatgtatactgcatgagagaagggagtgttcctgttcttattcaccactgtgaccccagaccctgtactatgcctggcccacagtaatcttttaggaaatatttgttgaacctatgtcagattattcaacactcaccccattcctcatgggtttataaagcctaggtcataaagtgtctgaactgctggcaatgtttgcagggataattcatatgacaagtttctaaaaggatatagagaagttttctttcatctttgttttatacgacgctagctttctctctctagttaatggtatgattcgtcaagttctccaaatgccatctgctatgaaagcaagagcccaataaaaatgtctgcagaagaaatttcttaaagaacatctttagagatgtttatgtaaagtgatacaatgaaaccctgcacaaattaataactaaagcatttatgaatattagaaaggatgaggccaaaaattttcttggaacagtttttgtacatatgaggtaaaatgcagaagatgtcaaaggcctggcattgttatgtttcttttgccttttctttgcgtcccaaattattatggcatatacccaaaatccatctactgcttcagaagtatagatcattttccaaaagaagcatctggaatagctaatttgttaccaaagccggtgattaaacacacatgatactgtggggctgaatggctggccatgagtcccagttttccattgtattgggtttcagctattaaccaatcagtctgtttttagagtatgaatttgtaatgtagatggctcagaactcttggctacggggcccttaatgggacagcatttctgtcacatggaattcttgttgcttggtttccattaaggtatcttggcttttaaataaactgtcaagtaaaacttggcatcaaaacacaaagtgagtaacttcctttgttgagtcgttgacagctccgctgtgtgtcagatagatagctgctaagagtcagctctaaaggcgattgcagtctctttggaaggatgctggtatcacaaactgccttcctcaggattaaggctaagcaaaatttagggataatctttatggaaagttaacccagcaacggccagtcgaccatatccctctccacaagtgttggttttggaattataaaagttttggaggtgtgaaaacataattggaaaactttttttccctgcttaaagggctaattgatttcacaggtgtttaattatcatttgctgtgagataataccttgtagtgccataaaaaatggatttaattttctagtgcttgcaaaaccatttccaaagccaagtcagagctaaagctagataactattctataaatcaaacacactgcctcctttctttgaaatttttaatacttggggataatgatatctgacaaccttgaaactaacatgaaaaggatttttctgccaagtgccaaaagtcaaccattggagcatttcaggcagtttggttcattaacagtgactcaggcagcctcaggaccctgcctgcaggcttccaaaacaccccaagggtagaccattggtgtgtgtcaggacacaatattatctaccaagaccaaatggtcatatatccaataaggtctacagaaaaacagaaataaaacccaaaccacccttagcacaaaaaactgcctggaaacaactgtaactctctaagctcaaactaagagtcctggaacttagaaagtggagatgtttcaacttgatcaagggatactttcctatcttatgcttaaggcacaacacttgtgctttctgtaataacaagggagggaatcataaaatcaaacaaatgttaacagctggaaggcaccacaaagatcatccagtccaaatatccagatgaaaaaaagcagccaggagaggtcaagtaacttacccaagatatcaccaggggcagaaccaagataaaaagaataattctgagtgagcagagaaaggaaaagaaagcttgaaaatagatttagagtcccattctcacccaaaatctaaaaatacaaggaagaatttttaaaaagacaaaaaaaaaaaaagtgaggtttcattctgtaagaggagtggctatttcttcaacggagcccagtttccacagaagtgcttaagctgccttaaataactacatgggggttttagttggtgccacgtttcggatttttttttttctctccaacttctattcagaagctgctgaaatcctaccatgttccattagattaagtgtgcttaaatgatctaagaaagcagtgcaatttagctggacacacacacacacacacacacacacacacacaccattatttaatttatttaatgcatttgtatggagggtgcacataccctaaaccactaaatgacaaagatttttcaggcagttcaggttggccttcacagtgctggataaaataatatacagcaatatgcagtataattggtgccattcttggacactgtgtttgggccctggtagtaaaagcctgggccaaagtcatgtgggctgaaagggcaggggacaacatgggccccagtatagtctgaaaagggttggaatggaagggcatccatagggactggcttgggattgcaatgaaactccttcaatgaataaaaatggtggtaataactctagctaacatttattgagaacttattacatgcccaactctctgcaaagcactttatgtccatttggccatttgctcttccaaaaatcctatgaagtaagtagcattatatctcccattttgtagaagaggaaattgaggattacacctaatttgtctaaattcacttaataagcaggtgggtataatttgaactgaggcattgtgacttcaggacccaagttattgtacacaattgcacgttgcctcctttccataatgctttttggagatgtcccattggctagctaagtgagctctgtcatgagggacaccatgagaaccactatgaaatgcaagggactaatttatgtcttctaaccaaagatgtgcctgacatggggagagagcttttatgtggctctgaataagagataacatctttcccagggtcagccccatctcacacactacttccaggttttggggacttgatagaacaggtgagaaataaatgcctgttcatttgctatatttatctcagccaggaccaccaatggaacatagaaacttcaaggcctcttcctaagactttatatgactcttagtttcccaatccatcatgaggctttggtgccaagacccacaacatgaattttagttccctaataagcttgtggagtctctactatgtgtgcaggtctttaagcccatatggacaaaattgggaagagacataaaacaaatactgcaggagacaatgagattccattcattcatccatccatccatttaccaatagcacttattacgtacccactaagcaccaggcattctattgtcaggatacaatggtgggcaaaataaaaaatcctgttcctttaccattcagaattatggaattcactgtcttgcgtagggagactgatagtaaataattaatcatataataaaatcaacagctatagtagttccaaggagagactcatggttctgtgagagcacacatggtagaggaacttgacctagtcagggggtggggacgaagctgaaacctaagcgctaagtgtccagcaggactggggttcagaatgcagtgctttgagcagtgctgacagtagatgcaaaagtcatcaagaaatttaaagtacttttgggaaaacgaagtatgtgtaccataattagtcatctcaaaaagtcaaaaatattttgctgtgatgtagactaaatccatcggatggtttgcaaaacaaaggttaggactccatgctgcctggaaaaatgattaaagactggatgtctgaggccgggcatggtgtctcacgcctgtgatcccagcacttggggaggctgaggagggcagatcatttgaggtcaggagttcaagactggcctggccaacatggtgaaaccccctctctactaaaaatataaaaattagccaggtatggtggtgtgcacctgtaattccagctactcggaaggctgaggcaggagaatcacgtgtctggatggataaacactttcattcagttaaacatgttgatcatatcagagcattccagattccacatacctgctaagcaataactaaggcaacggacattgacccacgttacagatagtaaagctgcatcagaaaagagccttaacaacttgattagagttaatgaaagatacttcaagttgttctagttcatcttatctgctcttccctggaaacctggcaactcacatttttagcacttatttataagcccctttcctattgccgcaaaattctacaggctctgtagaaatggggctgagtctctaaataatcacattttgatggtaattaaaagccaaattccctaactccctaaatgctatgagcagtttgaatgcctgtgttttgtcctaacattgagcatctctacgaagaaggaaaaccatgttagaaaatactgaaatgacttaattgcagaaagaggcagccttatgatgaagtagcagtgagcttctgctgggatggtacactcaggggaggaagctgctcacaggaagaacgcccaggagcgctggcctcagcccttcttcaagtactcactgctatgaggcctgggccgaggtcctacaggccaggagaagccctaagatgacatctttctgctatggtgacaagtccttcccattgactctaatagttgttaaggtaagagaggtaaagaagggaatttcagttattaaggcattagtttggattggagctgggaacaaaggaaaagccacaactgggcttcatccagcaaagacactattttcatccatctgcctcctagactaatttagggattacaggacctacccagggacctccgatgcagcaaagtaaggatcatattgtgaaggtagaccaggccaaaccattgccacctctaactttaaggctgctaatctcttagaaaaaaactggaagaaaaagttggagagggcagtagggggagaaaacacacacacacacatacacacacacaccatatatatatttaaagaccaccaaatacatttttcatctttaaatcaaagtcctgcatagaaaaagaaagctgctggtaagtgttaaaggaaaggcttgttgccaataatataaaacatgtttataaaataataccttagcatgtagaaataacaatgataatgatgatataacagccacactgttgagagcacactcattcgctgaacactatgctaattacatacagtattgcgtcctaagtgtcacaatctgtaacactaatactatggtcccatttcacagctgcacaccaaggctgacagagatgtgataatttgcccagagttatatagccagagaagcataactagaacctgaacatagccctctgaatctgaagtagatgctgctgaacttcacttgcattttttttaccagcagttttgatgccatatggagaaataggtataaatgaaatctttcaaagcaatgagcactgaaaagattttggtgcccattgcaatgagtaattcaaataatgaactactaaaccttaaaatgcagaacttatatgtatgctatgctgacattaaaatggcttgtttataggttttctgattgctgcattctggataagataaagcagtcatatcctctctccccactgctttgataggatgctaagcacatgtaaagttgtcggaaatcatctcaaacctaaaacaccaaactaagtggcaggtctgctcagctagttgtaaatatgggcctagcttcactttattgcactttgcagatcttgagtttttgtttttgtttttaacaaattgaaggtctatggcaaccctaagcaagtctatcggcaccatttttccaacaacgtgctcaattcctgtctctatcacattttggtaattctcataatatttcaaaacttttattgttattgtatgttagggtgatttgtgatcaatgctctttgatatgttactactgtaattgttttgggatgtcacaaaactcacccatattaagatggtgaacttgaaaaatgtgtgtgttctgactatgctaccaaccagccatttcccctccctctctctttgggcctccttgttccctgagacacaaaaatattgaaattaggccaattaataaccctacaatggcctacaagtgtgcaagtgaaaggaagagtcacacgtctctcactttatttatttatttagagacggagtctcacactgtcaccctggctggagggcaatggtgcgatctcggctcactgcaacctccgcctcccaggttcaagcgattctcctgcctcagcctcctgagtagttgggattacaggtgctcaccaccatgcctggctaattttttgtatttttagtagagacagggtttcactatgttggccaggctggtctcaaacacccgacctcaggtgatccacccgcctcggcctcccaaagtgctgggattacaggcgtaagccaccatgcccggccgcatctctctttaaatccaaggctagagatgattaagcttagtgaagaaggaatgttgaaaggcatgacaggttgaaagctatgcctctcatgccaaacagccaagtcatgaatgcaaaggaaaagttcttgaaggaagttaaaagtgttactccagtgaacacatgaatgataagagggagaaacagctttattgctgatttggaaaagttttagtggtctgcctagaagagcaaaccatccacaacattccccttaagccaaagcagagtaaggctttttctttttttttttttttgtggggggacggagtctcgctctgttgcccaggctggagtgcagtggcgtgatctctgctcactgcaagttccgcctcccgggttcatgccattctcctgcctcagcctcccgagtagctgggactacaggcgccagccaccacgcctggctaaatttttttttttttttttttttttttagtagagacgggttttcatcgtgttagccaggatggtctcgatctcctgacctcatgatccgcccacctcggccgcccaaagtgttgggattacaggcgtgagccaccgcgcctggccaaggctttttcaattttatgatgacagagagaaatgtggaagctacagaagaaaagtttgaacctagcagaggttggctcatgaggctttaaaaaagaagccatttccatatcataatagcgcaaggtgaagcagcaagtactgatctagaagctgcagcaagttatccataagatcattgatgaggtggctttacaaaacaacagacatgcaacgtaaatgaaatagccttagattggaagaagatgccttctatgactttcatagctagggaacagaaatcaatgactggtgtaaaggtttggaaggacaggctgactctcttttaagaggctaatgcagctggtgacttgaagttgaagccaatgctcatttaccactccaaaaatcctaggacccttaagaattaacttaaaagctgtatatttagctttaaagctaaatctactctgcctgtgctctataaatagatggaacaataaagcctagatgacagcacatctgtttacagcatggttaactgaatattttaagcctaccgttgagacctacggcttagaaagaaaaatttcttttaaaatattgcgttcgttggcaagtcacctagttacccaagagctctaatggagatgtgtaagattaatgttgttttcatgcatgctaacacaacacccactctgcagcccatagatcaagaagtaattttggggccaggcacagtggctcatgcctgtaatcctggcaatttgagaggccaaagtgggaggaatgcttgaggccaggagttcaagaccaacctgggcaacatagcaagacctcatctctataatcaaaaaattcagccagactaggcatggtggctcacacctataatcctatatcatcctagcactttgaaaggccatggcaggaggattgcttgagcctaggagttcgagaccagcttgggcaacacggcaagacttccccccgccaaaaaaaaaaaaaagtcccagatggcagcatgcccctgtagtcccagatattcaggaagctgaggcaggagggtcacttgagaccaggagtttgtggttacagtgagctatgacagcaccactgcactccagcttgccagcttgagcaacagaacaaaactgactcaaaaaaacaaagtaattttaactttcaagtattgttattttaaaaatacattttataaggctatagctgacagagatggtgattcctctgatggatctgggcaaagtcaattgaaaatcttttagaaaggattcaccattctagatgccataaagaacattcataattcatgggagaaggtcaaaatatcaacattaacaggagtttggaagaagctgattccaaccttcatagatgactttgtggagttcaagacttcagaagaagtcactgcagatatggtagaactagcaagagatctataattagaagtgcagcctgaagatgtgactgaattgcagcaatcttataaaacttgaatggatgaggaattgcttcttatggatgagcaaataaagtggtttcttgagatggaatctactcctgatgaagatgctttgaacattgttggaatgataacaaaggacttagaatattacataaacttagttgacaaagcagtggcaggggttgagaggattgactccaactttgaaagaagatctactgtaggtaaaatgctatcaaacagcattctctatggagaaaacgattctttcatgaagactacagagaagtctctcatgaaaggaagagtcaatcgttgcggcaaactccactgttgtgttattttaagaaactgtcagccaggcacagtggctcacgcctgtaatcccagcactttgggaggctgaggcaggcagatcatttgaggtcaggagttcaagatcagcctggccagcatggtgaaaccccatctctactaaaaatacaaaaaagaaaattatctgggcatggtggcctatgcctgtagttccagctaccttggaggctgaggcaggagaatggcttgaacctgggaggcggaagttgcagtgagctgagattgtgccattgcgctccagcctgggtgacagggcaggactccatctcaaaaaaaaaaagaagaaagaaagaaagaaaagaaagaaggaaggaaggaaggaaggaaggaaggaaggaaggaaggaaggaaggaaggaaggcaggcaggcaggcaggcaggcaaggcaaggcaaggcaaggcaggaaggaaggaaggaaggaaggaaggaaggaaggaaagaaagaaagaaagaaagaaagaaagaaagaaagaaagaaagaaagaaagaaagaaagaaagaaattgccacagctaccctcactttcagcaaccaccacttgatcagccagcagccatcaacaaggcaagacccttcaccagcaaaatgattatggctcaccaaaggctcagatgatcacaagtacttttttagcagtaaagtatttttaaattaaggtatatatattgaggtttttttagacatgttattgcatacctaatagactacaatatagtgtaaatataacttttatatgtactggaaaaccagaaaaaatcatgtgatttgctttattgtgctctttgttttattttcgtggtctggaaccaaacacacaatatctctgacgtgtgtcttagaacttagtgttcaaaaacagaggcacaaaacccagccactagttcaaaaccttccccttgggaggctaagtggagactgtagaataaaaatgaggaagaataagtcagcaactacacaatatatatgtatttttaaaagaagaaaacaataattgagagatggtttcatgatcttctcactactcctgatttggaaatctggaaagtgtggtatgggtatgagggggattcttctagatggatatgttaggtgaatccttgtagggtagtgcaagttaaaggtataacacacccaactgaatgtacattcatggtgtatacacatatattgcttctgggtttttctatcaaaagcaagagccaaaagaaaaatactcaacaatgaaatgtgtccagtaaccttattcttctgagatattactgtctattttgttactttggaagctttttggttttactgaacatatattttgattatatgcatatgcatagtatttaacatcttttcaacatgaaaagtgtccatcaatggatgattggattaaataaatggtggtatgtatgtatataccatgggatactaactcagccatgcacacacatagaatgaaaatgaggctgggcacagtggctcacgcctgtaatcccagcactttgggaggccgaggtgggcagatcacctgaggtcaggagttcgggaacagcctggcccacatggtgcaaccctgactctactaaaaatacaaaaattagccggatatggtggtgggcacctgtaatcccagctacccgggaggctgaggcaggagaattgcttggacctgggaggcggaggttgcagtgagctgagatcacgctactgccctccagcctgggtaacagagcaagattctatctcaaaaaaaaaaaaaaaaaaaaaaaatgaaagaaaatgaaatcatgccttttgtagcaacatgggtggaactggaggccattattctaagtgaaatgactcagaaagagaaagccaaaaactgcatgttctcactcagaagtgggagctcaacaatgggtacacatggacatacagagtgaaagaacacatactggagactcctcaaggtgggagggtggaagggggatgagagaagaagaaatctacctattgggtacaatgtccactattcagatgatgggcaaactgaaagcccagccttcgccactatgcagtatgtccatgtcagacaactgcacttgtgccccctaaatctatttcaaataattggtgattcagtatgtcctttgtaaaggaaagagtatctattacatagataatctttgccagggactatctgcggttgcaaattggagaatcacaagcagtatccttctggcagatatatttggtttagtccctgttgaatctaaacatttttcttaaattaattgccaacattttcaaatcatgagatttcatgccaaaatccggatttcaggcatctcatgaaaaatgggaagatttggcagcactggacctgctgtactccctcacggcaaattagcagaagctgagctggcttgattcatttattacatcacttacctggcccctgtaggcatctgagttagtaacccctggtctacaggtaaaggggctaaaggtcagatacaactcatctcagatgctggaagcagctttcttagtcgaaataagcagctgtcattagtccaaatagggacgaacgatttgactttaatatgaaatgttttatgtgggctataaaattatccaaactcgacacaggacattttgagcttatttccaaatcatctggccttcatctacccactggaactattactctgctgggtcctcatggaaacatatctttcagccctaacaatgagactacagacatctacgtccccaacacaacagctaaaaagcagtagaatgtcagaaaggctatccacttagcccttggctgacaggccccactgagcatcctttgcgaagtccatttactagctaattcataatttacacaaggcattcagacatagcagctaagatataaaacatttatcaacacagggactagtttgttattttaaaataattatgtttaagtaagccaataaagtctatcttctccaatttacttattgagctttatgaggcaatttaagtcccgattttggggggtatgtatgaaaggagagcatggaaatgccatttgctccctgaagtttttatcttttttttttttttttttttttttgagatagagtcttgctctgtcacccaggctggagggcagtggcatgatcttggctcactgcaacctctgcctcccaggttcaagtttttcttgcacctcagcctcctgagtagctgggattacagatacgtgccaccacacccagctaatttttgtattttttagtagagatggggttttaccatgctggccaggctggccttgaactcctgaccttaagtgatccacccacctcagcctcccagagtgctgagattagagatgtgagccactgcacccggccttgaagtttttgtcttaaaaacccagatcctcaagagaagaccaaaaaatggttgtggtgctcatatctctgagacatcttgcagagaggtaatccctaaatgatgcaaatctggtgaacataatgcacacaggggacaaaccaaacggtgaaaactgatgttaaactataaattttaagccacggacattagtgtgaaactttacagcttcaaactttcaaaacccacacaaaagaatttgtacgacactgatgaaaatttagacactagagatgctcaatcatgcgctctgtaagcaaatcacacttcatggttaattttgttgccagcaggataataaagtgtgatacaaactctagcacagtctcagctgctgttaaagagtctgaatggacagggcattacaatcattaagaatgcagccacgcaattcaaccagtagatggggcacatccacatggcaagcgtcctcactgaaccagccaggtgggaaagaataggccctgcttcctgctctatagccccctaccaaagagttacagagatagccaaatgcagaaggtgaggctgcacctcatctctaaaagaagtatttgattatttccttaacttctctttcattcctatgacaatgtaaataaaacgggtggagactggtgggattaggaggaatcagggttgaccacctcagaagggagaaatatattgaatccactctataaaagcacctccttcagtagtcagtgagtcgcttattcttactggggaccagtgtttactgagtgctcattccatccaggcactgctggaattggatgttagatctacaaaggggaattagacaggaatgggatgtggtccgtggagactgtggcttactgacactgaagtcctgcaaatgccagtcacctgtggctacaaatcatgacagggaactaaacaggtgggcgtgagaatgcttatgggtggacagtggcatctcagtaaagatggggtgctcagaaatgccctctctgaagaagtgacattgaaactgagggctgaggacagaggagaagccagctccctaaagggagctgtgggaagaataattcgggaagtggaaagcatgtatgcagagccccaggttgcaacattctggacacactcaaggaacaatggaaactaagccagtctgggtgggagtggtggaggtgttggcagaggaaggaagggaagtgatatggtcaaaggtatttgactaacagggcagtgggcgttgttagctttgatgcatactcatgtactccacagaaaacacaaacacaaaattatatggtgcttaattttccagatgctattttaaactttttacttatataaccttcacttatttctcacaataactctaaaaggcaagtactattagtatcatcctctttttacagagcagaaaacaagtacagagaggtgaagtgacttgcccccagacacacagctactatgcactagaacccagactggaacggtagtggtctgattccaaagtgcatgctcttcacttctatattctcagaagcactgttttatttcaaggtgactctgtatattttgatatcactatgctaagtctaggtttttttttttttttggcatgtttgttgtttgtttgttgttgtgacacttttgtattgctttgctggcagacggctgatgcgggccaaataagaaatccacaatctggcacagagtacacgcctagacagatttatcatatgtcctgataatcaagcacaattgtgtaccccaacctttgccagatgccggcttcctcatgaatctgggttctgtacatggactccccaaaggacagtaaatcagcgcactagatatctctgcaaagtttccagcagatgcttgtcctgtgcttaccctgcccggctccagatggctccacatcctgctccttcctctcgcgggcacttcagatatgtcagcaacgcagggtgaggaagaaggtggaaggagcagaactaacgtagttctttaagaagccccgcagagcccagaggtattttatatatgcatatgaggagctctaagcccggtcagcataaatcactgccagcttttactacctggacccgattttcaaaaggatgaagttgtttacatgttgcagaaaaggtttctgctaccagttaacctgtcacctgctacaattcattccaatctcttccataggcaacaggttgtatggaattttcctgcactgacatattagcaagacaattctatacctactccgtcctctcaaaagggagagaacaacgctgagaaataggtcccagcaaaaagatgttaagaaaaaattcttaaagcgtatattgcaaatcaacaacaaaaacacaaaaatcagaaaaatttttaaaaagacttcattctttcccagactaaggaacaggtttacacacttttctttctccctaaattaaaagtatccttgaccttatccagtgatttacacacacagcactgtcactaagttttgcttgccttttttgggaacagtctagaccagggtgtccaatcttttggctttcctgggccaggatggaagaagaattgtcttgggccacacataaaatacactaacactaatgatagctgatgagctttaaaaaaaaatcgcgatcaggagcagtggctcacgcctgtaatcccagcactttgggaggccgaggcgggcggatcacgaggtcaggagatcgagaccatcctggctaacacggtgaaaccccgtctctactaaaaatacaaaaaattagcggggcatggtggggtgtgcctgcagtcccagctacttgggaggctgaggcaggagaatggcgtgaacccaggaggcggagcttgcggtgagcgcagatagcgccactgcactccagcctgggcgacagagcgagactctgcctcaaaaaaaaaaaaaaaatcgcaaaaaaaaaaaaaaatctcataatgcttcaggaaagttatgaatttgtgttgggccacattcaaagttgttctggtctgcatgtggcacaagggctgtgggatggacaagcttggtctagataatccctacttccttcctcttctccaaagatacacagatttttcaaaaaagtagaagctgtttttttttaaaaaaatagagttcataacactagtattcatttatttgcatcagaaattaattaccatgacagaaacccaaatgaacatctcagagccaggtgtgtttgagatgagctgactgactccatacaaacacttgttgattttgcttgaatcctctgtaaatttcacttcccacttattagattttcacagaggccagaagacccaaataaaatcttctttacttttttgagacagggtcttgctttgtcgctcaggctggtgtacagtggtgcaattatggctcactgcagccttgacctcccggtctcaagcaatcctggcacctcagcctcctgagtagctgggactacaggtctgcaccaccaaatctgcctaattttttaaaggttttttgaagagatgaggtatcactatgttgcccaggctggtctcccttacttttaaccagtggtaaagaggagcctatgaggtcatcttccattcagtggtatctagactttgtgattatagagcgagaaaaacatccagtggacttacttagaaatgacttccttttgtcttatacttactgagagatttatttccttcatccttcttgtaacctggggggcctggagaatttcacactcattgttccctatcttcctcattctacagacaaatgtagttatagataagattatttatttctgactgtcaagactcatagcaaaacttgcttgtattacaatattcatcctgtctggagatgatggcactaatcgtataaatcgtgtaaataaccaggtgtcttcacagactgaaagtctagaaatgcatctaggttgacaaatatttacaccgagttatattgctttaatttaccatcagttgaagggagaagggggtgagcaatatcacattaataaaggaagagggtattagagcttatcatttcatggaggcttgtctttcttgtgtatattctcaacatacaagaagttaagccaggagcagtggctcacacctgtaatctcagtactttgggaggtcaaggtgagtagatcacttcaggtcaggagtttgagaccagcctggccaacatggtgaaaccccatctctactaaaactacaaaaattagctgggcatggtggcacgtgcctgtaatcccagctactcaggaagctgaggcaggagaatcgcttgaacccgggaggcagaggttgcagtgagctgagattgcggcactgcactccagcctgggcgacacagtgagactcagtctcaaacaaagaagttaaactattaaaatctgaaaaatactaaaaatatttttaattcaaaatataattttcaattaagcagagacttcacctcagagataactgataaaaactgaggcacagagaagttaagtggctgaccaaggtgacacagctggtgaaggacacagccaggactctaaccagctccacatcacaaacgtgctgtaatgagctactggctgcccagccagccgactgaacaggttgtttataaaatggagcaaatactatcaatcccacttgcccttagaaatgcccagagaattaaccaagctcaaggacagtggggatggcacagaactgactgtacaggtgtaaagtgtgatgatttatgcaggaactagctatcaaagttacggaaacctagaattttatccattgttgggtatctcccagtagtgcatgattagccattcttgacgatgattctgtgagctgttagaagtttttgtgtgtctaagtagatctgtctgaaactattttcaggttgtatgaatctttgtctaggaatttgcttccctggcctacccaaaaaaaaaaaaaaaaaaaaaatgaagtgcattttgttctgttcacagatagctttctttcttgctactcttggccataagaccaactctaaaaacattggtgaccctgaaaatgtctcaaggacattcagtttactttccttgcctctaagccactccttcttttaaaaaagaaagcttgaggaggctgggtacagtggctcacgcctgtaatcccagcactttgggaggccaaggtgggtggatcgcgaggtcaggagttcaagaccagcctggccaaagtagtgaaacctcgtctctactaaaaatacaaaaattcgctggacatgatggtgcgtgcctgtagttctagctacttgggaggctgaggcagaagaactgcttgaacccaggaggcagaaggtgcagtgggccgagattgcaccactgtactccagcctgggcgacagagtgagactccacctcagaaaaaaaaaaaaagcttgaggaaatttatagcccaggaaaatgagtggggaagagatgctatttaaatgtaaaatcactcctgctagaggtagtggtgggagtggggagagatgaaagaatggggtgggtagaagaaaatgtccgtccatgggcaattccatttttggctattccatggagacaaaccaattagtgtggattttcaaggtggtttgtgtgaactggctacctgcccattatgaattggactgggattaactagctcattccaaacactccaccaaacagcaaatggtcacaggaaaatgatttttagtcaccaacaacctggctggattggaaacttggagatgaaagccttgataacctcctaccaatctacaaagagactgtgactccttcagatctacccacttctaaatacctttttctccctgccctcttcattctttgcttttattccttaaaaagctcttttgcagttcggaggctgtttgtttttctgaacataaacatacctatcaaccaaccagcctggtaatggtcaatgtgtatgaacaccaccatttatgtgtttcatcatatgagcttgcatgactgcctcatctataagtttaattcaacccccggttctagaaaccagtttacttctaatagagaagccctgagaaacttgggctcaatattgagggcttcagcacacgactaatgccataagcacttttaattatctgtctcagcttcttacagctggaatttcccttgttccagacacaaagtccttaactttatattccaggctcaggaacttggctccagggatcaccaccagccaccagcatgttcattcattcttttctccaagcaaatgatccctacaccagggttaacaacctcatcaagagaggctaaggcgatttcagctgcaaccctctgtatgtggcatccctgtggcttcccaccttagataattgctatcctcctttccctcacctattcccttatggggagccactcagtccctttggcttaggtgggactgatcaccactcctagggtgcagcatgtgatctaagtataagccacaagcacatcatcatatttcccaggccacagtttttcagggatggtgttgggaatcattgaagccaatatggctggtcagcttctttaattttaatttaaaaatgttttgtttgtttgtttttgagacagggtctcattctgtcacccaagccagagtggagtggcacaatcatagcttaccacagcctcaacctaccaggctcaagaaatcctcccacctcagcctcctgagtagctgggacctcagtacatgccaccatgcctggctacttttttattttttgtagagacgaggtcccactatgttgcccaggatggtcttgaggtcctgggctcaagcaatcctctcacctcggcctcccaaagtgctgggattagaggcatgagacaagtcagtgccggtagtatctgcagtagaggtaggtagaggctatatatattcttccacacatcctcacgaccaaggggtatgttactatgaaaatatgtcacggaacaaatgttgaagtcctgccaaaattccagcccatagagcagggcctgatacccactgccaggccacattaatgctgatgtggagtagccagccctcaacaggctgcctcctggacttcctccactaacctggcctggggcccccaggacctccccggagccaagtgcctgccaaaaatctcactttttgcacaactctatgttccctgctgtgtgtgttctgcctggcgggctggacttcccgccagcgcccacaggcccccacccagtgtctgccccactttggcggatgaggcttctctccagacccatgtcctccagtttgctctgtgaaccccagtgagcctgcccaagcctgcctccatatccaccatgaggaagaatttaatgaaagaaaaccaatgtgccaatctctaatactggaacagaagttccaataggtggtgaagctcaatcttgcccataaatagtgatttatttgtttggcgcagaggattggaaggacaaactgtaagctcagcttcaactcagagctggctaaggggctggcagacaggtcaactctctgagtccaggatgcacaggaatgttctggtctcaagtgcatgatgaagtcaattaccagaagttttttaaatcctccaaagtatctacctccttgtcctaaactatgactggaaattcaaataaaacacacttagtaaatttccttctttttctggcaatactggcttttattgaaggatgatgtagcaggaacaaagttcattctcaatataacttatcactttatactatctacatcttaatgtcaaacgcaataatctctagcatataaatgctattcctgattttaaaataatcctatttcattaagctacattttaatggattctacttgaaaaggaagggtggagttcaaattccttagccataaacattcattttccctcatatttatatttacatacacacacacactcacacatatatatctccttgaaataaggtaatgttaggtgagtagtacttttaataaatgtagttccaaaaaatcaaatcaaatagtcctttggatcatgaattactttgtaagattcagaaaaatactcatttttctatgagagacaaaggaagaaaacaatgaggtgatgttgctacccctgttgcgagaatcaatgtcccccaaccttgaagcactattgatttcaaatgaaaatgttgtttctgtagttttaagactttgctccttactttaaaaaaaaaattaggaaaatgaaaaaacttcatctaaagatgaccaaactattcaattatttccgtgatggctcatttctcttaacacataaacaaaactaaaactgaaggaattagatgtgataatgacatatctctcaaatctcatggtaaaattggatgctcagtggcattaaaacacatctcccaccaataactttcctctgtgattgccaaggtgtaggtctctcttattcaaacatctgagaattgttatgtctgagcatctgctcacattcaacatttgatgctagtctgttatttgctagggactttcctaggcacaggggatacaaaggtgatcctctgagctaaaaatcagtgtatcaacgggcattaagtagaaggagcaaggaggggtctgatgttgatcttgggtgcaccatttgtttccaaattctagcaagttgtccatcagtctgtactatttaccctagagtgaattgtggacacatggctcattcataatcagtccttagctccatccacatttattttactgtcatgcaacttgctccagagtaggaggcctcttcctactccaagtgttagaaaatacagatgaactttaccattccacaaaggataaagggattgggagcctgttgaaagcagggacagtatcactctacttggtgtcccgtatccacatcaggactcagtgggtataccataaatgctttgtcacacacacacacacacacacacacaaaagattgaaggaataaaaaacatattttttaatgatccaatttaaaacatcaccttagtattataaacagcattcaggggaataccaactgagtttctattctgcagaagggtaaagcaatagagagaaaaaaggttaaaagagcaaatctctagccgatgtaactgggaaaaaaatgtaaaaagggctgatctctaactccaagtcctgagcacaatctttggctgttgtatagaattttcctatgcattgcctgcatcttacagaagtatttaaaagccttccctaatctgcccttgtttagttttagctgtattctcccatggttttctgatataatcaaggaaaaaatcaaccctaatagtgttttcattattttacagtacaattattttgagagcatggaaccttctgagcatgttcctataacttcaagacaaaaatgcagtactgtttctttcaacataaatgcatgtactggaatactctggcaccaacaataggatcaaatgatagaactcttcgttcagaaagcctgtaagaagactttatcctcatccccgtgaggggcttttgcacacatctgtttcagctcagtcccctagagatatctaaaatctaattaaccaattaatttgcaaatatattctaatgtatgcaaggcagattttcttgggtgttaaattatctgacactgaaccatatacagtacacaagagcgggacctcactgaaataccacaagttaccccaatgcaagaacggctaggtgggctctggtccacaagcacttctattccctaatgagaaaatgagttaccatggtcaggttaggttgtgtgtgcttcagtaaggtactgctaaatgcactggtgagacagaggggtcatcaggcactctgaggcttgtcttctaaaactgcttccacagtatcccctagggtagggctggggtgggcacggttgcctggggccaaggaattggagaaaaaataagccagctcagtggctcatggctgtaatcctagcaccgtgggaggctgaggcaagacgatcactggagtccaggagtttgagaccagcctaggcaacatagcgagaccttgtctctgctaaaaataaaaaaaataataattagctgcatggggtggcgtgtacctgtagtcccagctacttgggaggctgaggtggaaggatctcttgggctcagtagctcagtagatagaggctgcagtgagctatatcacaccactacactgcagcctgggcaacagagtgagaccctgtttcaaaagaaagaaaaggaaaaggaagggagggagggagggagggaaagaaaaaataagatgatgatacatatttcacttagtctgttttcctagggtggatgaagggaagtttaagctatgggaagagtatgctctatcatactgggaattactaactgctattaatttgcatgcagaactctgttcttcaagaaagcagccacagcaggtaacattgtttactcagacaatcaagttgtaatttactgaacttgtggattaaaaaaaaaaaggatgttcttaattgctacattgcaacaatttatccagctcaatgactgtatagctacagataagaactcagaataacactatcaaatgttagggggattacctaatttacaaaatgaagagtatctcaatgcacagtgtgttgttacctaaaaatatggaatgtggattttaatatgtttctgataatatgtttggatagctgctaattgtgcagcattaaagcaaagctgattttgttatttatcttttattcaagacaaattattattttgattattcacaaaatggaaaagaaagaaatggcaatattatacaatgtgttttggtatcttatttctataatgtaaatttttctactattcaatcactttcaaagatctccaaacacatattaaagcgaatactgaagcagagaaaaaaaaaaaaaaaagaaagaaatgcatgtccagtttagggttgaggaagccaagatgggatttttacataataaatagattctaaattttcttcaagggttagggagaagttaaagagaaagagtgttagtatttgctatggtctgaatgtgtgtctcccacaaatttcatatgttgaaatcctaacccaaataccgatgggatgatgatgtggagcttttgggaagtgattaggtcatgagggtggaaatcttttttataaaagagactgcagaatgattcttcaccatctcagccacatgagaatacgatgacaagcccgcagtctgtaacctgaaagagggccctcaccagaagctgaccatgttggcaccctggtctcggactctgagtctccacaactgtgaaaaataaatttctattgttcattagcagcccaaatagactgagttcttacagttaaaacgtggattggtcaattcataatagttgcctaaaagggtaatctatatatgcaaacttctttctgacaacgaaactacaatttcccatgaagttgagaggggttaagaaaatggagaaaattagcaagtatggttaagaccaatgttgtcctgtgacttttttttttttttttttttttttttgagacagggtattgctctgtcacccaggctggagtgcagtgatgtgatctcggctcactataacctctgcctcccgggttcaagtgattcttgtgcctcagcctcccgaatagctaggattacaggtgcatgccaccacgcctggctaatttttgtatgtttagtagagacagggttttgccatgttggccagtctggtcttgaaatcctggcctcatgtgatctgcccgccttggactcccaaagtgctgggattacaggcatgagccaccgcgcccagtctcactttaaaggagagagttaaagtgacatctaaagatatgcatcccaataggattggggtgattttcaacattcatataaaaaatgagtttatcaacactcaaaatagatttatttggtatttctagtttgtttgtttaaaatgccaacaaaacataacatactatggctatcttcctccatttgaaaagacaagtaatgtggtaaatatgctacaaagtggcctaggagaatttcttaggtatctcctttgactaacatactttaatccttttcactcttgttagcctcagcattagtgtaggtgcaaagcagctggtgagtaaatttgggtataatgagccagtctagttcattctaacaatgagaaattcctaattttaaatggtcatttcttttttaaatagaaatgaacagagaggtacaaaaaggctttggtagagtatgtcataatgcataattatgaatatatattgtcaagtttgtatgacaatttagatctttaatgttttttccattatatctttttaaagggaacaatcctggccggacgtggtagctacaatcccagcactttgggaaggctgaggcaggcagatcacctgaggtcaggagttcaagaccagcctggccaacatggcgaaacctagtctctactaaaaatacaaaaattagctgggtgtgttagcacatgcctgtaatcccagctacttgggaggctgaggcagaagaaccgcttgaacctggcaggcggaggttgcagtgagctgagatcgtgccacttcactccagcctaggcaacaaagtgagactctgcctcaaaaaaaaaaaaaaaaaagaacaatccttttcctcaattatcctgggtaatttgatagatgagctatcatataatcccctcaattgatctactctgctactcatgtgcccacaaaaatctaggcagcatactactgacaatgtgagcttcagaaagtctttcatccaaatggattccaataccaatgatagaagaaactagtaaatatattccttttccatcttctttagtgtcaaagcacagatacaggtgactgcatcttaaacactgcccagttttcagcactgtttcatttcctgaattccttcttcctaactgtccattagcggctttgacaatagtgttagccagatagtctcctttctacacatataaggtgcaaaaataaaagattttaaactgcagcttgaaggaacaaagtattgttatgttggtcaggttttctatggattagacgttaaaaaacagtggcaatagaaatattggtactcttctctgtgagttgatatgaaggctggaaatcagccgcctaagatgatcatttaaaggtaggggatggggccaggcgccgtggctcacgcctgtaatcccagcactttggggggccaaggcaggcagaccacttgaggtcaggagttcgagaccagcctgaccaacgtgctgaaaccccatctctgctaaaaatataaaaaaaaattagccaggcatggtggtgcgcacttgtaatcccagatactcgggaggccgaggcaggagaaccgcttgaacccgggaggtggaggttgcagtgagctgagatcgtgccactgcactccagcctgggtgatagagtgaaactacctctctaaataaataaataaataaataaataaataaataaataaataaataaaataataaaggtaggggatggcaaaggaagaagccttagtatttgccccttctagcctcttgtttctaaaataacaggtgtaatttcagagccccaactgctaattccacatgcaaaattgttttaggcaatcctcccaatgcattctagagacttttcagggtcatttttatttgttagatttccacggtattcaagtttctaagtaagcaaaaattatccgttgccaagtaccatctttggggagaggagttgagggaagaagaaaaaaaggacagagaagaatataaagaaaagctgaaaaaacatagatcaggccccaagattccaggtttccagatgagcaaatgcccatctggcccttctccccatgcaagcagtgggcagtgaccgtgggtgcttactgcagtgggtagaaccagtttctaaattcaaaccctccaggcagggaagagggcaactggctagtgaaaagagaaatgctgaagactgaaagctgaactgaagctttccttagaacctaaagaacacaaatgaattcatgcaacaaatattctgagcacctatccatgccagaaactataagagatgcccaatatgtagagataaataatattcaggccttggcctaggggcactaagagtctaatagtctaaccattaatcaaacagcaacaataaagggtgataaatactctatgtggaagtgtactcagagtgtatcggggtatactgggacagagaagcatctaactcacaaggaatatatccagaggaaatgacacttgaaatgaattttaaatgacaggacttaagagacagagaaacaaggagtacttgtgtcaaaagagagaatgcaaaagagtatgccataatttagaactttgcaacagaaaaggcagaaacacagagcaatttatttcagaaacacccaaatttattttaaaacatactagactccagacccagagagtaaggatggatgcttataaaactgcttttttaaaatgttccacatatgtggtccaatgggaattttaagaaatgcattccattccttgttgataaaatagaatttgggttatttactattttgaaaaaagaattttctacctgctagaggtaaggacgtaggataaaataaataacaataataatgataataaatgggagatgtggggcatggcatagcatctatttataaaagatcttaacactttgtgttttctctctcattactttcctatcaggcaggaaagtaatgaagactgacacaaaattaaacaattactagtcactagtgattggagattcatttgtttaccattcattcttccacagatatttacggaagcgcgtattaagtcggaggccatctttctaaggtattagaactacaacagtaaacaacaaaattgtaaaggaatgtcacaagtaagctgaaatgccatagacatttcagctaccaggctgtgggaaaaaaggatgacattgaaataagaaaacgatatggccagccaggaacccgtttttctaacagagaacccctggatgtgcctcaaagctaactaaggctctggtcatgtcacagaggcgtgattaaaccagccctaatgactgagtaccttgaagactctggatgttaatgacagagtatcttttgcacgctgctttccttttagtcagttcatctttacccagtgcagactttaatgtttgcaaaaaccggaggccggcgcaactgaaatggtcaggccttccctagcctcatgagagaagtcgctgaattaatgaggaaccagatgtaggctcttcatagttggagccgccaccccaagaaaagctccagggaggggaagggaagtaagcaatggccaacccaataggaaaccttcacagggagtggagagcattttctggccagattctgcaacactgagacttgttgtctccactgtagcacaactacagccaagctgaggtgagaaaaaaataattaggtcccaaatctgcattaaaacatttttgcagggttttgttcttgaagtggaaaactgttcccacaaggtctatttttaaccattttattttaaagagatcagaaagccacttcatgttgaaatttctcagtggggaattttacagtaatgctacttaaatccaacctaacgatgacaaagcagaggaaatgagtgaatgggctaagtctgtggaaatatagcagcccctcccgcttaaatcaatgtcatggctcagagaggctgtgagtacaatatggtggtatatatgcttcctttctgacacaattcaaaagtcaagcagaatcctgaattttaggaaagtactagttcacagtcaactttttctgttaaacaacaagttttaatgtttttttctccctaaaattacgcaaagactactagtatttcaagtgattaaagacaccttggttataataaactgaggctatgccccttggtgatttcacttgtggtgtcaatttatttagagaaataaatattcggctaggtgcggtggctcacacgtataatcccagcactttgggaggccgaggtgggcggatcacttgaggtcaggagttccagaccagcctggccaacatggtgaaacccccatctctactaaaagtacaaaacttagccaggcgtggtggcaggcacctgtagtctcagctactaggatggttgatgcaagagaatcacttgagcctgggaggtggaggttatagtgaatagagatcacaccattgcactctagcttgggcgacagagtgtgagactccgtctctaaataaataaacaaatacatattcaacctactatccagagtcagattttctattagaggcagaaaaaggaatgtgattatcctgagtatacacttcagtaaaataaaatcaaaggaaaaactcattgaaaataaatgacatagcacatttcatcgaccaaatatttggtggtcatctactgtgtgccaggcacttgagatacaccatcaagaacaaacctctgccttcatggagcccttattttatcattaaacacacaaaccatgttgtagaaattagatgacctggcataaggttggccaagttgtttgtgattcagcttaaaatctctcaaagggctgaagtgaggagcattaaagaaggagaaagatttctagaacaaccaatctctgcagataagaatatccagtgctgtaaatgcaactacctcaatgccctttcttattctcatcatcaccacaagtccaggtttagaatcttccagtgattccattctagaacctgagaactataaacaggcacaacagtatgatgaggatgtcatgccagtgggctgtgttgcagtaacaaatgaccccatcacttcaatggctttcaacaacacatccattgagggttggctgtgggctatgctccacttcttcatggtgagacccacgctgtagagcacctggcctctgagacgttactgttttcatggcagaaggaaacatgagaatggtgaagccataaaatggcgcttaaagcttttcctcctaggtggcacaggtgacttgagctctcatttcattggccaaagcagataatacagctagatgtcaacagctcaagaatatatcatcctacaggcagcaacagcaaacaaaacactcagtgatgaataggttgtagcatttatcagaatgcaggtgactaccaaaaaagatgtggaaaatatttctaacccttccattttcccagacatgtgattactattaaattgtgagtgaatcttctgaagggaaactactccctttcatgtcataatttctccccagaccagtagcacacagaacgtaaagtgaaacaaaaacagagcctggagaagttagagaaaactaatttttctttctatggttagatgtcaaacaattcattttccccctcaatcattcctttccacatgaaaaaaaaaaaggaactctataatgtggaagactacattctatattttattttgtagctagtaaattcttcctgagatccacatggtactttatacaggcaggaggaaggagacaggttatggtgacactaacctcttgaatttttgttatgcatcaattagatgaaattagaatacaggaaagacataccttagcaattgcaatgggcatcactggcctttgtttcaaaagagtgaccaagcaactacaagaacatgcacaatctagagttaaggagtattttatgcattttccccccaaaacacaaaagagaactagaaatagttcagatcagtctctggtcactcctaaaaagatgtggtcctaaaacagatttgagttggtattatttcagccactttggaaacagcctaccacttatgattcaaaatccatacaccatataaggtgtgctttggatgagtctttcaacttttctacatgtttaaacatttatgttaatttataaataaaacattagggggaaataatgagtaagcctggaccttcagtaagcctgaaaataatgagttagcctttgaaccccaggagcaataattctctatgcataatcatgaatgaaattcccttaccatgtgggaatttttgacaacctctataacctaaacaataaataccattctacaagcaagtttggtcccaggcatgtattcggccattcatccaaagagcattttaagttacaacatgtgtgtagaactctgcttaccagttctagattcatttgcttcaagcaacatgccaagctaccaaatcaacaaatggtcaattcaccaaagacagcgtgctgaatgaccaattttctaaattcaccaggtttatgaacttgttcctttaaattatttatggagtttgcagtagtttgtatataatgggatggagtgttcttaaaattgttagatttctgaagttcatgacaggttttcctactgccttcatagtattaaaggaatggtcaattcatcaaaagctaaagatgattttgttttcttatgaatgtttaagatctagaaaaacgtattccataattagtaaccaatgagtcaccagaaagttttaaaatatatattgctatgttttgcctcttttttcttttttttttttttgagacagagtgttgctctgtcacccagattggagtgcagtggcacaatctcagctcaccgcaacctccgcctcccaggttcaagcaattctcctgcctcagcctcccgagtaggtgggactacaggcgcccgccaccacgcctggctaatttttgtatttttagtagagatggggtttcaccatattggtcaggctggtcttgaactcctgacctcaggcaatccacccacctcggcctcccaaagtgctgggattacaggtgtgagccaccgtgcccggcctgttttgactcttttatgaactcttttgtttgttgggtttatcgacctattaacctttttaggatttttttaccttatgcatcttttaacgcttttgcattactcttgttttggattaggtgtagtatttaagaacatatcttccttatacaataaagccatctagtagaaatcaagtgcaggtgactggaatgtatgctcaacaagggcaagttatggtctagttcagaggtggtaaactatggttcatgcattgcctgttttcataaatcaagattttttaaaaaacgcagcttgaacttgttttatgtatttctgtggctgctactacagaaaaagaaaaaatgtcaccgtttaatggttgcaatagaaatggtgaggcctacaaagcctaacatatttactatctggaacttcaaaaaaaagaatatttgggactagggatctagtttattacagtatccacagctcctggagcaatgcctgactcatttaggagggctacataaataccagttgaatgaatgaataaatgactcctggtttttaacaaatggctaccccgcattcatcactcatttcagtgcttactgtctcacaactcatgggctggtgagaggtgttggttcttcctagtgacacagaaattaggcaacttgagtcaaggggtaaagcaaaccacctctgtggttccaggactaaggccaattgtaatgcagatgattggtttgcggcaacgtaaaaaccaactcacatttctgcaaagactatattgggaaactccaaacacaactaagccggctggtctgcaaaaactcaagtcactgtttgtccctaaaaagaaaagaaaatgtaggttggccaatccttcttccctcttctgaaggttggcagtgattttgtggtcgaagtgatgagctaccctgaaaagtcagaaggaaaccacaaaacccacgcccattgctcctcctaagctacagctgctgctgcacacagcagaaatatttatattctgccagagatcccccaggactatcctggatagagtagcttctacagacgttattctggtgggaaatactacgaaaaagtcaagtgctgatcaatctattgggaattttctgccatttaacacctgttaaggaacctgtaaccagacaaaaccaagtgagctagaattttattgttgtttaatttaatttatttatttagacaggttctcactctgtcgcccagactggagtgcagtggcatgatctcagctcactgcagctccgcttcctgggttcaagcaattctcccacctcagcctcctgagtagttgggactacaggcatgcaccaccatacccagctacttttttgtcttttttggtagagaatgggttttaccatgttggccaggctggtctcgaactcctgacctcaagtgatccgcccgccttggcctcccaaagtgctgggattacagtcgtgagccatcacgtccagctcgtttagttaactttgaatggcaagtggcaggatggttgattggttggttgagaggtgtctagcagtcctactttaatttcctcttgcctgttaatgccactatgattaaggctcctttcctccccatccccatactaattcctaattcatctcagtaaaattccccagggtagaacaaggacacaaatcattactatgaagctgtaggggtaccctaagtcaactcattttctccaaagcaggaacactaaatcagtccttggtgcctatcacttttttttggtattctgggtataaaaatatgatatggcggccaggcacagtggctcatgcctgtaatcccagcactttgggaggctgaggcaggtggatcacttgaggacaagagtccgataccatactggccaacatggtgaaaccctgtctctactaaaaatacaaaaattagccaggcatgatggtgggggcctgtaatcccagctactcgggaggctgaggcaggagaatcgcttgaactggggagacagagattgcagcgagccaagatcatgccactgcactccggcctgggcgacaaaatgagactctgtctcaaagaaaaaaaaaaaaaaaagaaagaaaaaaaatgatacggcatcatacttttgttcaaagagaatttgttgtctgggagaaagaaaggcctaagcccatgtaatatcaaggttgaaaaaaatgaaaagaaattatgttcgaatactaatgcatactcaatattcagtgaggggttctaacccagctagcacaccccagaggtataagtcttgtctgacatcaccaataaataagagggttcacttatgtgatttgaatttttcttttgagtatcggaacatttaaaactagtcctgggcacccagcctttgaggaggaaaaagtcaacttttaaggttccatttgtttgacatcatcccctggtcaacttcttgtaaaacttctttggccgctacactgcaattcttgagattacaacttatttctaagtaatttcaggaaccatccgacaaggcttatccttattgccctggatggtgctgccaggaaaagcaatgataaaagctcatcaaaatcatcacagctatgaaacagccacagacaattccgaaaggctgggactaatccttgagtccactcagtctctctcctaaaggcacatctgttgacaactcttttctttctggctttctaagatccctcaataccttcatagcaggcaaacagacaaacccaaactagagctaatgtcagcaaagtccactagcgaagcaatccttgtaacgaagtgcacctggagagccctttggagtggtagggaactatgcaagcagctttgtgtggctgtcttttcagagaccacagatcagctggagcttagaccaggcagccgtctaacagcattagcaggtaaactgcagtccgacttgaatgtacattttaaaaatttgaattacacagtgtagttcctctgtaagaagacttcaaagttttcgtgccagaaaggtgcaaagtgacttctgccttcacatttgtgagcttttcaccctctcaaccagcttatgagtgtcacttggggatttggagagagtcggagggaggaaggaaatcttttctctttgtgtcttcagagagactcaggagattctgcttatgtacatagaggttaataagtgactttaattgaaaaatggccatacacttgaaacaagattttgctctgaaaattccttctatctgtttaagcatgaaaagaagaaaactaaatattatcataccttcctctcctttctccacgccattccttggcatctgctactccatcccagacagcaggaaaacaagaaagagtcttccattcccaaaagcccccaaagaagaatgaagggggaaagggattggcaaatatccctttggtgtcattgcttgggaaagagtagaaatctgtgacaagtcaagcctaccttcaggctgtccagctgttaaagtctgcagccacttggaggtgctggaggtaagtgagctttttcttagatgcaatcattactgccaaatgtagaaggtgggcagtcggcttcataccacccaaggataaacagccactgattacagtaaacacgcacagcaaatgcacatcaaacacatcctgcttcaaattaccgttgtatcattagtgtgcaacagtctctatacttttcttaacagcatgctagaaaaaagccccccgcccctcaaattctcttctattctgttcattgcactgaaatgaaactgtgtgaatcccactaacacttaaatattcacctgctgtgctgctttattaaacaagcacttaggagagtggtttgttgggaaaggggtgggtatagcacccagctacatgctgcaggatgaatgaaaaaggaacttgccatcacatcccgtcttctctccagctttctgtagcagcaacctggctcaatttcccttgattagcacaaagatttagaatcacttttcaaaaagtgctaatcagctttagtttcaatggatcgaaatacaacataaaagtggttttctagttaatacaggcctgctgattttttcccgtgagtgcagcattagagatgaatctaaaaacatagctacaaataggtgtttattttgaaaacatccaaaacatccagctaccatacactgttgaaggtgagaaaatggtgtcaaggtacagcctacctatcaatatactcttcaagataaataattacttatataataacttccctctaattcatttcaggacagaaagtattaggtactaaagaataaagcaaataaatcaacactcatcttaatgcattccttccaagtgccatgtatacatgtgaaagtaaatattttaagtaaatatcaaaagatgggaacttgcctagagatttacatgtaaatttaacagcaaaatcaaattgtcatattaagccaatgtttcttaatatctaaagtctaaagttgttctggcaatattaaccgtactggcaggggaggagaaggaaaccctaaaatagatttttttttccctgaaaatggaaagtaacagacaaaaaaaaaaaaaaaaaagaaagaaagaaatctagaatgtcatctttgagacacagtgatgaagacacatgtcagtgcctcctacaggtacaaaatggtaacataccattagaggaggggaaactatttcttggcttaaaatgtgatactgaagttcttcaagagactcctaccaacttgttccaccaagacttttcttcctgtcctgtctctgtatttttgatagccattcacatattctgaggaaatttagagcttctccctagtagatatcctatgaaagaattcattaatctttttccttctctcatatgtcactataatccacatgtacacctgggggcttcccaactccattatctctgtaaaagccagcatttctgtggactgctccagtggacattggccctttgacctttaatcaagggctggcaggagatcctagagtatggtggaatgagcttagaattttgagcctattgaacctggtttcaaataccagttaaaagttgcatgactgtgtgcaagccaattgtgtgacctctccctgaatctcagttttaaaatgtatacgatggaacaaataataaacacttcacgaatgagatgaatatatttactaaatacctgacatataaagatcaaaaaatagcaaaaaatagcaaaaatagcagtatatataaaattgtaccttgtaaatgagctggcttcagaataaagtttttgtttgtttgttttgttttttggtatttcaggaattaaatcctctttgatgtagtacaaaatggaaaccaccttatactgcactgaattcattctcatggtgaatgctattcactagggttccagtgttctgttagtttctttccattccagtgggagctctactagaaatactactacacaagtggcatgccagtcaatttgatgacacaaatacttggtgctacctgctatgtcccccaaatataaatgagcatgaatactcctactttcaaagacaaagcagttaggttgttgacttagtaaatagctactaaaacaaattgccacactactcaacttatgtgacggatgattctcctgcaagttggctaagcaccaaaatgtcaaattccaaagaaaagctacactttagagataaaaactagatatttacccagtcatcagccaccactgggcaaaatcctgcagaaactcctagatctctgccatctgcctgttcgtctcattccatgttcaaggcaattatgtccattcccatttgtcaatttcagaaggggtggtttctacctgctatgaagtggtgcttaaatgggcaaaattattcaagggcttcaatcttcctagctggaaaacccaaataatataggacagaggttaaa

SEQ ID NO: 29 - DNA, 131855 bp, Homo sapiens
gcttgttttaggaacaaacactcttaaaacctagactccgtgctgtgagaagcacaaattaaccataagcgggagatttgaggccctcgctgagagcctcagctgagttctccaccaacggccaacatcaacttgccttgcctgccatcttggaataatatcctccagcacctattgagcctcccctcatgggtcatactagccaatgctacattgagagagatgagctgatcctgctaactcctgttcaaatttcagaataatgaatagaagaataaacgttgttttaagccatcatttagttttgcagctttagataaccaaaatagtggtctgaccatagcaccaagcacagatgtgaagtgaactctgctcttccagcccaatatgcaccttcctgaatcaccaagaggaagagagcctgcctctgacctacactgagagtttgagaaggctggcttatgccctgatattcccaacaatattctctttaatatcaacagcaaaagtatcatttattctgctctttttaagtgccagagactgccaagagctatcaatgtacacatatgtagcatatcattttgtccatacacagcctgtgagaaatgaaatatctctataagaaggttgaggaaactgagacttaacgaagttaaataatttgcccaagaggttccaggcgacgttccagtaataaaattaagattctaactagtcctttactgctaaagccagctttcacccgggatatgcctcctttacactaggaaggcattgctgacccacttccatagcctgagtctcacattctgttaccagcagaggggtaactactaaggggattctactaatcttacaacactctctagcctttatcttcccaagcatacatttttttagtagttgccaaacatcaggcaacttctgccttctaggaggggaaaaaaaggaacccattcttggcaacatcccactcctcataggtgttctcatccctggttcatctccagccaccagccacccacctcagcttcattaaagagcttgaatcaccaatgggaaaacacccacccctggcctgacctgtcacaaccatactccttgatgttctctagggaaatatgcacacaggggacagggccaggaaaagaaagtgttgttactggttgaatgctggaccccagatgtttgtacatgccagtattgtataatcataacttttatttgcactaggcaaccaaaaaaaaagtttgtgtgactttctttactgcaatatttgctttattgtggctgtctggaaccaaacctgcagtatctctgaggtacgcctgtatgtttcaaatgttaataataataattacaaagggacaaaagagggaagatgggaagaggaggagaatgaagatgggtttatgggggagaaagataggagttctgaggttgagatctactgttaacactccttgtcaatacagcatgccacccactaataataattattcatttttaagtctatttgacctgttaaatagtgaattcattgacaacagggatcctgccttaggtaaatttgtaactccatcttatacagcactgacatatacatttttaggatgatggagactgaatgaatattttttcttaatttctacagttttcctagttgctggcaccttggccctgtgtccaaactccttgttccaccgtttcagcttctgtgggccataaatcatgatatgacaggaagacattgagaaaattgtatttggccaagatgcagaatcccaaagtcttgaattatgccctcccacagactcccttttcaaggaccaaagaagatatacgcagagaagaacagtaaaaaacacacagttgttacatgagaatttagcatagtgaacaaagctggatgatgtgaaggccctgcccagcctaaaagcagacctaagcaggccttgcttcttttccctctggattcatagccacgatgaggggaaatgagtccttggagaatcccaccaaggtcaagcaagccagagagcatttgccctttttagctggtctagtgggcaactgcagggcatccctagagcagagtaactatcaagcaggtgcagcatggagcctatttctgcacctgtcatgaggaagaaagagagaaggagaaagaatgctccaagagatgacaaaggactccagagaaactgctgccacttgggacccagggcggatgccccttacttattagcaaagatgttcaagcctctagcattgtggcacagtaaatggccttgaccttaatccattatcagcatttatccttgaggatacaatttggagcttggtgtagaagaggagcttccctcagaggccaggatagctctgaagacatggcgatttgtttttcctggtacctgctatcttactttgagctgtggtacttttaccttactgtttcttgtttttctaccacatctttgcatctttgcatttttggtcccatctctcttgaccttgaactcaacgtacatgccttatctctcatgagttctctgtgttcggtcttgggaaaagagaacaggaattttcttccagtgaattctggaatcttcatttgtcacctttctcctcacgttttccttgctggaagctgcacacacatactcacacaacacgcatgcatccctttgccttctgtggataaataagattttgtgtctcagagcacaatgctctcttgggctctaccttttggtgatatttttgaaatcaatttaaagtacccttgatatcccttgaaagttttgtaagatttaaccccttaggggaagagtcagagggcctctctttacaccttacatccctcaccctttcaatcccttgggtaagaagagacatctgaaaggttgagatgcagtctttactctgagaacctccctccaaaactgcttcaactgctgacagctcacaagacagaacgttgagttaatacccaatattaaacaaagtcaaaaatcaaatacatcaatcacctaactaaaagcacatttcaaaggaagacatagccaactggatggcaatcctgagcaacacttgccttggcaggtatctgatgaagacactgctctgtcttgcttccaaagtccttctaagcaggcagcttggcaggccagtcttggatggagagggatgcctccagtttccggagccagagctgaggaaggagaaagtagaccacctgcaggcagtacaacactacttcatacttccctaatgcctcactcacattagcacactgatcttgcctatgaccttcactgagctagatcaagatccccatgctgcagtgggaaaacaaatatccattgtctactgatacccactgggtcacttttgcttttgaattcttgaaatctggattccctctcagtgtcctctaggttaccagtacacttatcccctccaaatcagggcatagttgcaactaagcaattaagagaagactggagaccagtgggattggaaggtaatggtgtcactggagtttctaggcttttatctatccagacctctccaatgtcttgtcatgcatcaattctctcatccgatctttttgggaatgccctcatcctgggttaccaaggagcacctgaagcagaggataagtgaatgcctttctcaaggcacagggcaagacattggtggtcttgatttgctccatcaaccccacctcccagatttatgtttgaactgtttgatcctggtgctcacatgcaggaacaggacactggagtgtgaaacgacaaaatacacctctttcctaaagcaaagcaatctatcttgagcacaaagcttgtcatgacactaaagcaaatcagtgtaaacaagggcagagatgagaaccataatgaagagtttgagaaattgtaaagtggtcctgaaaggaagtggtacctcttgagaatagtcctataaagtgtatacctgtcactaaaagatgcccaagacactgaccttaagccaattaccatgtgtagatctgctgtaaccaaagaaggtcacagatattcgattctgcaaaaagcagcttttaaaaataaaagtcaattcttggcatgtgttgcaatacttcccctgttccaaacataatactgaagccacccacaggaccgctgtcttagccaaatacagtaaggaaacaagccttctcgggaaaggcccacatgaatagtatccaagggccaaggtcaggtatcaatgcaaaccggctgcaaaatctcctcttctagcaccactgggcatactgtagctgagtaagccagcgatactctgtccagctttctcaaagtgctgctcataaagacaattccatagactacagggacagatgtccgctggcactcagaacttcagactctggggaaggctctgcccagtttttgcctgtgaactcaatctctataaaacagagttatggcaattgagaaaaaggcctctcatacagtctccatgtaatccagagtatctgctttctgaaataatttactgatcttttccctatacaatttttttttttgagacagggtctcactctgttatccaggctggagggagttcagtggtgtgatcacggctccctgcagcctcaaccttccaggaccaagcaatccttctacctctttcccccaagtagctaggaccacaggcatgcaccaccatccccagtgaacttttttattttttgtagggaagagttctccctatgttgtccaggctcgtctcaaactcctaggcttaaatgatcctcccacctcggcctcccaaagtgcttggattacaggcgtgagccacaatgcccagccctataattctcattgtcatagctagatcattacatgcaggagggcagagacgatccagctctagaagcaactttaagccattaggactgactgcttccctccaaacttaccacacacttgggttcaaaaaaacgggaccatatttcaatgttttgcattattcatgccatagtcctgaactattcactctaattcatctcatttcttgtttcctgcactatttttcctggcttttaaccttctagtctgtcttctgacggatgatctttccttgcttcttgaattgggtcctgaacctgagaccttcttcagcagtgggtaagagaactggctttgaagccagtttttctttctttttttcatattatactttaagttctagggtacatgtgcacaatgtgcaggtttgttacatatgtacacatgtgccatattggtgtaactcatcatttacattaggtgtatctcctaatgctatccctcccgcctcccccaccccacgacaggccccagtgtgtgatgttccccttcctgtgtccaagtgttctcactattcagttcccacctatgagtgagaacatgtggtgtttggttttttgactggattaagaaaatgtggcacatatacaccatggaatactatgtagccataaaaaaggatgagttcatgtctttgtagggacatggatgaagctggaagccagtttttctaaattcaaatcctgatgctgtcatttattaacagtatgatcctggacaagttattttaattttctaaactttaattttcttaactgtaaagtggtgctcataatagcacctacctcttggtctgcagtccagtgctcctggccgggcgcggtggctcatgcctgtaatcccagcactttaggaggcggaggtgggtgaatccgctgaggttaggagttcgagaccagcctggccaacatggcaaaaccccatccctactaaaaataccaaaaaaataaaataaaaataaatagccatgcgtggtagtgcacatctgtagtcccagctactggggaggctgaggtgggagaatcacttgaacccaggaggcggaggttgcagtgagccaagattgtgccactgcactctagcctgggcaacagagcaagactccctctcaataataacaataataataacaataatagcacctacctcttggaattcttgagaagataaaatggtttatatccaaaacaattagaacaacaacccagcgcagctgaattgctcaataaatgctagcagttgtgaggcatttttcagccacctctacagccatgtggacactttagtcagcctgagagaatacccagtacaggtcatctcccagatattttatacctgataatccatgctaggttcactcaagcaaacagagaagaaagcatttatttctctttgctctaacacagaggaaagcattatgataagagctaagattttcttatccagtgattaatttcttattggatccagctatttaaatggagctccacagagagttagttaaattaaacacaaaatttcttcttttttttttttttgtcaaagaaacacttgccttgctcttcactatatagtaaaactcactaataaaccacaacatgtcttacatgtctgttcctgatctccatacttgagtggtcaccaagaaagtattgtacattcaatccatagcatttaatttccatggaccctgcctttaacaggttattatctggttgttaagagaagactaacacataagacattatcaaagaacaatagaaggtatataattaagcactgagccaagtaaatggtgccgattataaattcagtagttctggaaaggacacatcaggtaatgggttatagtaactcacctattcactcaacaaacacttactgagtaccatccaagtgccagtttctgtgctaggctctgaacgtaggtggaggacattgggatctttcttccctgcagtcttccattctttcctacggccccccatggtataaccatcatgcagctgggtcattcattcttctgagccaagcatggtaaattcattcaccttgtcagtgattggttcctaaatgaccattgatgttgagaagaattggcttgaaacttctgggaaagttcctccttggtctgaagaaactatcccaggaagacatacaccttttcccttggttgatgccaagcatggatgtgaagtccttaactaccacttacatcttgccaccagcttgcaaatagagaagcaagggcaaaaaaaaaaaaaaaaaaaaaaaaaaaaactatagagaaacagagtcagtgccattagattaagtcaagttttcatagacccctacttttgggcgtccagtaaaggaatccagtacatttccttattcacattagcttaagttttgcgcttttttttttttgcccctgttatttgcagtcatacatattctaacttatagaacacatgaaaaagacaaatgaaatacaatcagttctcaaggtgctcacaggctattgttaacaaacatgtaatcctgcagcattgtaatttgttagttaagtacaaaagaataatggttcaggaataaaagtatatcaaaggaaggaggagttggcaagatctaagagaggtagctttaccaactttaattagtctttgaaggcagtcagtgaataatgataaaacagtgagtaattggcaataccccagcttatcactgcaaaaattggcttaattcctattgctttgtcaatttcagttgttattactaatgtcttaagatagggaaaggagaatctcttcctagaattataagctaaagaatatgttcctttagtttgattcctgtttctggattcagtctggaagtttctgtttgcaaggctttttttttcttttctttttttcttttgagacagagtctctctctgttgcccaggctggagtgtagtggtgtgatcatggtcactgaaacctctgtcttctgagctcaagcaattctcatgcctcagcttcccgagtagctgggattataggtgcctgccaccacgtccagctaattttttgtatttttagtagagacagggttccaccatgttgcccaggctggtctcaaactcctgacttcaagtgatccgcctgtctcaaactctcaaatttctgggattacaggcatgagccaccatacccagcctaaaggctattttttatctctaaagatgaaactggcttcagaattatagaaaatcagaacattttacccagtgtgcataagttttcgtaattatgtgcatgtaaggaaaaaaacattttttctgtttgatatcattagatggttgaaattacactttcatctatctttctctacagaaagagatttttttctgccagctaaaaaaaatccagatattcattgactagacttgtgattatctattttacataagacttgggcttcatcgtataacttaactgtaatattgaagatttccaagttaaatttgggaaacaatgttaaagccttgctaagattgtggttaggagaagccgtagtatagaagctttatttagttgagcttcaaatgctcaaattaatttccagcattttccaatgtttataaataaaatcattgctcatggcaatgtttccgtgatgggactttctgaggaagtctctcaggagaccactcaggtccccagagttggttagcagctccctacatgctgtctggtgtgctaggaaataaatttacagatattaaaaacctagattttagaatcagactgacctgggttcaaatcctggttctgtaccttattagctgtgttattttgagcaagttacttagtctccctgtgtcattgtggtaaaataaaaacaagctaagattattttgagaattaaatcaaataatatagtcaagtttcttaaaagagtgtctgacattcattgtctttgaacaaatttattgaactagagacataaggcagacaaaagtaacccccatgaggcttctgtaacaaatgctcaacaaataatatccaaatagccattattatttttaataagatctgtttatttcctgggacataaccattatcaagtgctcggagagaaaaatcaaagaatgatcatagattcctccattgcctcctgcctcccagcccatatccattctatcatgtcatgctttgagaatgggtcttctccacttcacctgctgccatgccagtccaggaccgttatgcaaatcatagccctttttttgaacttcttatgaccatcttggccatccattcttcttacatccattctgcacatactggttgctgattttttttttttaccattaacatcattgattttatttgccccaaaccttcaaatgacaaaccattccacgtgaaattaatgtcaactcttcccacgtttcttgagcggggtgctgccttacctcttcttaacatcatgcaccctgtatagcactattttctagacaccctagccttcctgatgctccttcagcaaaccaaaagccgttgctctcactcttctccctcctatatcttcatagagctggccccttatcatgatttgaaagtcagctcaaatggacttccttaggttgttcttctgcagccggtctcaaaataataccctattttgtcttcttcataatatgaaatgagtttgtctacttatttatctttctacaacttctgtagctttctagaatgtaagatgctataaaggcaaatacctcatctaccctgtcagctgctagatcccttgtgccttaaaagagtacatggcacatagtaagtacataatgaatgtttgttgactagtatcatactgagactccaaatgctgcttcagtttattaacaagtttcccaagtcatttaacttcctacttgggggagtttagacccttagagttatgagttcaaagaacagagacccagggaggtgatgagtcttacagaattagttagtgttagagcctagacaagatccctggggcttctaagatctagatgagcaccttgccataatattggtttgctaggcatgagtcctctgaccctctagattgtccagaagaaggcaatgaagtttgaaatcatatcaatcactttcaatggaattaagacctggactgggtggaggaggagaactatgctactgaaaccaaataaagatggtacaagggcagagaaggcactagagtacagaatcccacacacacacaaattacttctttatcaccatgagtggaaggacctcagattcggagctacaagttgtcaacattcaaagcatgtatcgaacactgttctgattaatagaattatagaatctcagcatggaaagataacccttctcacatgttttacaccatttacagtatgtctgcctagaagtcatccacctcactttaagtatctacagttaggaagaactcactgaatcccaagtaagcttattctgtctttcaacagctctgattataagaacatttttcattaaactgggctaaaaaccactgttgtatattttattgattctagttttgccatgttgggttatctaaaggcagctatcatgtcacccccgagttttcctttgtccaggtttttctaatactttttctatggaatgatctttcattgacaaaaggtttatttttgctggtctttccctctctacatggttggatatatcagcattcctcatgaagtaggtcttcaggtataggaagagcagtttagaagccagaactttccttgcactggaaattatatttatgtaatgtaactaaagttattagtctatatgagtactcgcaaccacccccaagccacctccagcccattaaaaataatccagcattgacttctaggttcccactccctcccagtcctactaaggaaggatttttgcttgctgagagagaagctaagttgacctacataataaagtgataaaggggttgtggcctggttatcaaggaagagtttttttggagctcaagtttataagaaggaaacactagagcaactgcgggtataagggaattggagagaaaaagaaaaggtggcattatgaagcaccaaggtggcttagtaatggaattctcttagatgttctccaagaaattcaagtagaaatttctagttccttttaactgcctttagttgttacactatgttcccttgaatgtgacacaccactctatgacaacagtggtcactgaatttataaagttatgcacattaaaaattaattccatagcaatgataatgatttatacgtacaattatttcactgtactaaggagttgacatttattatctcatttaattcttagagcaagcctttgagatacatgctattataatccccattttttcagatgaggagactgtaaaacagaggtaaaagaaattgtttacagctaagcaatggtatagttctcagacccatgtctgtctaactctaaatcccgtacattatgcctcatggtagtccttgagcagaatggcctcagtgcttgtccagaaagaaaaagataaacagctagagggatgagcctggaatccaggaattatctgctgctccagggagaccatactacctaaaacctgtctcaaggctgacagtccagcactgagatcattgagatcagaaacaaaatcaaactgatattgaggtttctggaacattccttagaaaaagatccaaactttcaaaaacttcaatcttattttccacaatattgatggcacaattttagcccatggctatttttttccttcttgaacacatcaattcagaaactttaaagaacaaaattgtgttcacaaaaatgtaattgataaaactaactctttcctagctgactttttatggcttcagctaaaattcaagctaaactgaattccataatggaccatacttcataataattgtagtctatttgtatgcaaatagctgaacgacatctctcaatttcagactctggctgtaaactcacatcagttttgggtagattctaattatgaatctgatataataggtgttgaattaatgagaatctctgacaccagttttgagagttaacactcattattcactatttgaaccttaaaaatggagtatctttatgatagaatgtattgggtggtaccattatctagtaactatttgatctgaaatggttatttaatttcttccagaccacagtgttagaaaaatgagaataataatgattccatgataggattattggataatgaaaaaagataatgtatacaaagtacttaggaaaatatttgtggatcaataaattacagttttttctgctctctgttgctagatcagctgaaggtccctccaagtggccaaaacttagtaactccttcataaggcattgccttgctacagatgtcctcaaaaagcttccttccgtgatgagagcccaactttaatgtgaacacagagacaatctttaataagaactgaggaagcaggaatcaaactcataagacagggccaggtagacacatacataaggtctgctcagggtcaacaacttgcccacctagtatcacataacaccctctggcattaatgatgcccatcctgccttgcatttctgaggacaagggccatagaaggaaggcaacgttctttccaggggatgtttatttttccattaataaagggaaattactttgttggttgagagcccagattttaaaattactcccatggctgtatctaaaaccaattaaatgttttaaaactcaaatttgtttggcataatagagttgaggctgtcagatcttgtgacatggccagtcataaaatgttccctgggaaccgaatggggcatactggggggagtgggaagagagaaatcataatcacttatgttcagaggggcatagcaaatgcctgggtcaaacccagcttctgagaacaggaaaaaatccatccaaatgggtggaagatggttatcctacttgttggcagtatagtgtgattaaaggacaccaggctttagaattggacaaacagatcttggctcacatccgggctctgccctttattatctgggtgacattgggtaagttactgaccttgccaagcctcaatttcttcagttgtgaaatgaggatcataatattaatttttttatggtggctaggataatgtaagtaaaacacttggctcaatgcctcatggattataagtgctcaacaaatgctagatgtagttattgtcattttattgttgtcgtttgtgtgttagcagctattatgtactagttaatccacctattttgtctcttttctttaggataaaacaccctgtgatgttactattaacataccattttatagaggagaaaactggctcatatatccaataccacatagttaagagaaagcagagctgaaattagaacctaggtctggctgatttcaaagcccatgctatctccgttgcttccatcactactgtggaagtgaaaagcttcacttgtaagatgtgggctgtaatctaagaaaggctttgatatgtgaaagtaagcaataacaggacatcctgacaggtgagtatgtagaatcctgggggaaatttattcagagatctggacaaacagggctgtgttcagggatatcagcaaagtcgatcccaagggtggattcaagggctcaaggttacaaggccagactcagaacagagctggctcacacaccagggtaggtggctccaggttacccagaagcccgctagggtttttaaagcccctgttggcagagggaagaactaggttcagggtatggggtggcaccagctaatctgcaagtgggtctcaagtagatccagatgtggggaggaacagaggagaagcaagaaatcaggcaagtcctgacatcagcaacaactagtcgattgatgctttttttttttttagctttgcaacagtttccctgaaattgtgcagacagtcttaaacctgtcaattctggaggctcctgatttatatatgaacactgcactgtcattctccaagtgcaaaactacaaaatgcaatgtttctttctctttatagctatccattcttccatgaccttgagtttaatgacagctgcttctctagtttttccagttattagggaccttctccatgagcattagcaattctagaaattaggtaacactccctggcctatgacttgcacctgtgacccatgacagaggcagaattcatctattgcagagtcagcacatatggaaaaatagatgaagtcactgccttatccatgtccatggcagacattattaatcaatcacagcactctttgtaatttggcctagaaaatcttcacaattatgctccaaatctaatcaatggattagatttagcacatgataaaacttactgaccagtgaagcctagtggtttacctttcaataaatcactgaattaaaaataaagctaataatggcagttttaaattgactttctggttaattgtacaaataaatgcctaagtacattggaatctggacagaataagaaaagcaaaaacaaattttaaaaatcctcattatagaagaaggaataaggaactctgaattcttttattagctatctgacttaattcagctatgtgagcttctactatatgtcaagctgtattctaagaactttacatgttatctcatttaatactcataaaatattaaatagatattttcattgatttttttaaaaaataaagaatagaatattaaagaggctaaataactccataaagatcatgcaaggtcatcagagatagcaatgagatttaaatccagtccacctaattttgcaaccagtgcccttaacctctacattctatactgtctaaccagatatataaaggccaaaagaaaaagaaaaaagctaagttggcaaacaatgggcatgccctagattcagaatattcttaaggtgataggagttgctaagacagcagcagttctttcaaggcttcacatcagtctgcccccttggggaccaaagagaatcaggagccatggcagtgcaggacaatcatgctccacaatcccaatggattgggacatcggaaaatttccctttgggaaattctgttccagcagttaactaggacatgaaataaagactacgtgggcacatggcccatgattttctctgctctatcaggttgactgacttaacagaatctctcttctctctagaggcacatgcatagccccaacagatgcccttgccatgcaagggaggatgaactatgacagtcaatgtcaacccatcaattacaatgtagggatcaatcctaaaggtcttgtcattcctgaagtctgttgtagccaccacctctcatttccttggcttatgagtagttccaagggagacgggagcgcagctgggagctggaggaccccactcctgttcaaatagcaattaaacccctcaaatcttctcttgcagaaagaaaattgtggccactctagcatgagcttcctcaacttgtctccatctctgtttttctctattatcacttttttcttccttttttgtgctttcagaagagaagcatctccgtattgaccaatgctgctgctgctgcttctggtgctctcttctgcagtttccctgggacattgctccattgattctctcctccctatcttaaagagaagagagataacccaggcagtcaaaattttcctatagcctgtaaaacattctttcctttgagcctgctaccctgctattgcctgatctctttcttttctcactctccaccaacattcttgcaaaagtaatgtgcacccaccagcctctacttaatcaccaccactcactctattacccccagaatagcacatctgtcaccacaactccaagagaaatgacttctttttggtcaaccacatggatatttgtatcagattgtgcagagaagacttccgtttataaatgaaagaaactaagtcaccctattcaagactaaagggggaagggagtgtttgtttactgcttcacatgcccaaaccttgaaaagggcaggaatggacctggccagagaacatcatcaggatgctctgtgtgactgcccatctgtctctcatttctatcgttgtgtgccaacagggaaatggggccatagaccattctggtctcacgtttttcattgtgttccccagtttgttgggaaaatccaaagaaaggaatcaattggcctgccttgatttgtatagccacttcttgaaccatttactgtggccagaggaaagccatggcagttggatcagcctaggtcctgcgtctacaaggctagctagaaatgggcagcattctggtattagaagcagctggggaaccacatacatgcctgctggggaaatcataaactctacagccaccatgatttatgtctactaaacagacttatgtgtacagttgagtattgtgcagaataaaataatagatggtggaatggtggtcatcatcaaaatcacacagttatgaaggctgagcaaaactattaagatatatttgcaattctagccaaacatgtatttaagatcttatgtcaagtagacctaatgcatctatgggatctgagctctttgacctgaagggacatccagtagggccagatgtcccaaaatatgagctccacctgcctgctgcttttttgcctctggaaaccccttttagtttcaaattttcacaattcaagtgcaaacccctatgagagggctcctgtcatagttacaaattaacagccctggaaagagtagttcacagacaaatctgaacaaaaagaccctgcagcaacagaaccagaaaactcctgggaattttgggacagtggaaaaaggaagtggagctgcaggagcaacaagtctttcccagcttgaatttagcagacagtaatatcatatgtcaggagagtgctctgacattttctaaacattattatccccctcgaaagaagaaaacagtgaggctgagaaagatttgttaaggactcgtcttgtgtcaggtgaactaaatactgcccaggatttagctcaaccccattgtgcagatgagaaaactaaaactccaagaacctgaccacatttacacagctgcatagtggcaggtttggaattctcacacagatctatttacctggctccaaaagactgcagatggggcagtgaataaatacgataattggtttcagaaagtaggttttttgacttccaagttagtgctctttctgaggagtataccacctttcttatttaaaccataatgttgaacaaagcatttccacaagagcaatgtccttttttctctttacatctgcgaggcaggcaggaggtggatgattttccctactcaacagctaaagggaccaaggctctgatgataaacttagcccagtcaggatgtcattctaaacccagcagggctgggagccctgcaggcactttgcttttgctttctgtaatcaccttcccccgagttcagccaatcctggaaccagggccaggctggctgtgtttgagtgagctcatctctccacgttttttagcttcaattcctcataactgttttacattctgagccttgctcttattttcagtctttcatgaagaaaagttgttacattagaattgagtgactgtctgcctcgttcctcatctcgaattgtatttttacattatcaagtaaattaaaagccatacattacagaaactcatttaaaattctgtttagtgcatatttgcagaacttttgctgattcaatgaatgcctcacttaccaatcatgtgtaaatcagcgttttgctgtggggaatactttagggccggctgaactgacagcatccagttggtactttctcaagtttcaggttatctctagccctccacacctgagcctgggaataagggggagctgagcccaggaaggcagtgtgacttctggggcatgtgcccacgacttcacacctcaagaagaagggggagatggcgcattctcggtagtggcagcatctctggcagaatcatcactattatagtaacactaccaatagccaaaactggcttcctgggcacactacctgtgcagtcatgaaaagcacagtgatgaaagggccccgtgcttagtttaattatctgctattgccaaatgaaatgcttgatcattttttagcaaaagtctctcattttcatttttgcagtacacatcacacagtcaattttgttgacagctgtcacttagtgaagatttttctctaagttagaccttgagcttctcttgcatcatctaatttaatacttacaatattcagttattcaacaaatattgagccactcattaggtaccaagcactgtgctaagccccagggatgctagaataaacaagacaggcgtggtctctaccttcatggaacttacattcaaacagtataatcaaaaataaatcaaaattgtaataactgttctcaaggaaaaaacaataataaaagaccaaggtaaatatattagaaagggttcatttaaaataaagtgacaaggaagggcatttctgagagcctaagaggtaacaattcttgtacccattttacagataaagaaactgaatctcagataggttaggtgacttagccaaagtcatagagccagataatggcactggcaagctctgaaatcaagtctttctgacccaggggccagtgtgttataaaaaatcttttcaaacttcaaataatagtaatcactggggattgtattaaactatagattctgattcttggatggtgctgatattgctgggcccagaaccccactctgagtacaaggccctaatccctgtgttagtggacatggttgggtggctgcagacagaactccagggcactaagccctggaaaggtggttcttgccatcagaagtggtagggctcagtaccagaggggcagagtgggaactcaagggctgcaactcctggaagatttcatgaatttgcaaaaaccctggggaaaagaatgcaaagatcatcctaacagttctgaccaagaactttgaagagggctcacctacaagagaaggagttttgcccccactctacagatccaaaagcctaggtatatcaccttgagtgctaagaaatgtttctttcttatgtccaactacaatctctcttattgtatcttaagctcattttcttttgcaaatttctttaggaagaaagaacacaagcagttagcatttccacatattgaagttagtttcaagtcatctcttatgtttctaagtccaaatctaaatacctcattgcattttatttttgtctttataggagtatgggagtcattttttaaaatctctacaataatcttttttctgattcttctgcagtttttatgagccaaatatgacattatgagatctgactaattcatagcaaaaataaccacttcccagccctcataaaacacacttcttttttccccacaatgtattaaacttatggtcaactatgaatgccaggtctctttctactgtttatgtatatgttgagtctctgttctctgtgtttgtcttttttgttaagtactgaaacaatggcaattgacacagtagctggcgcgtagtagatgattaataaatatcagtgaaataaacgtataaataatcttgaactagtttttgctgaattataacctgtttttaaagtgtatttctgtgctcaaatcattaggaacctccctgaagggggaagtgacctcacttagagcaaagacatgagtgtagaattgcctggaggcatctaataaatatttttcatgagtgatggttgaccaaagaaagagcagagtctgtaattttcgagatgatatagagaaaagaaggactaagaaagactattggactgggaatcaaccagcaaaacttctagcattcgccataccccaaattagctgtgtgaccttgaggaattcattagacttctctgggctacaggtatcctagccaagatacaatgggtggaatgagatgatcgatctctaagtttctctttagcactaacaatctgtggatccatatgaacacttgtatcagggtttagaaaatagaaaccagttgccaaaagacaaagatttgtttagaaatgcaagttatctgtcagaggatccttggacaaaaacagctcttgctttctcctttggagtcatattttccacccttgtggcttattgcaatggtctttaatgcatgcagttttctctgtgacccctttcagtttgtcatgcctagctagatttgtgtggtgcctcatcacaccatttggctctgcgtctgcccgtgtttggttgcaaagttcacagtactcctcgtggtgtgcttgatttgccctcgaaactcccattgactttgtgtactcattgcctgatcaggcccatttaatctgcacaactattcaacacaaagatggataattaaacattctatggatttcagtctcattctccaagatgtaaggggtttcctggcagtactgtctgcctgaatcccttggagcttcctgagagctctcccttcataacctacagataaatcactcttcttccccagaaacacagccactttctcttttctaagggcatctacttcatttgtacctgggccatggttaggatatttcaggtaatttcagctccaggagggcagcactgcaatatcagttggcctccatttacctctgttccttcctgcctgccctctactgagggcctatttttgccagaaaattttgtttttgtttgtttccaatccaatacacaagcttcccacaggtacctaatgtgccatctgcattttagcaaatattatctcctcattcagcctgaatcaagggcttttctcttacatctggaatttgtaggtatgctgtgtgcattggcagagctaaccatgagtggaaacaaaacagcatctgtgaaatgggataatatagggacagaggccaaggaactttgaagtaagcaaaagagaaaactccagctgtgtttaagggaaagttaatcaaagcaacatgtgttgtgtattttagacctactatgtgcctagcaatgtgctgaatgcttttaattatgccaactactcatctcaatgtctccatatagtattagtttcaacttagaagaagtaaggctaggagagaaaaaaataactttctcaaagtcaagcaactaataagtgggttcaaatctaggctttcttttttttaatttgtgtaactgtattgggtagaactgtaattttgttacatacatagattgtatagtagtgaagtcagtgcttttagggtatccatcactcaaataacatacatcatcattaagtaatctctcatcattcatcgccctcacatcctctcacctttctgaatctctgttgtccattccacagtctatgtccatgtagacatattatttagctctcatttgtaagtgagcacatgcagtagttgttcttctgtgtctgagtggtttcccttaagataatgaccttcagttccatccatgtcgctgcacaagacatgattttaattttctatggctgaatagtattccattgtgcatatgtaacacatattctttatccagtctttcatttatgggcacttaggctgatttttgctgttgtcaatagtgctgtgatcaatttatgggtgcaggtatcttttttatataatgatttcttttcctttcaaacctaggacttcttaactttaaaatttatgttcttttccttttttatcaaaccgctatgagagggaagagtaaatgtgaggacaagtgcaggagaggagagggagatacaggaaaggaaaggatgtaggtacattcacagctgcctcaagtggcactcagagtgtgtcatccatgccagtgatctgtcatcaataccagaaactacatacactttacaatttggttccagcacaacaaaagtcaatacatataactctcttctgaatctttcatcatcaggcttcttactggggaattctccaagtgtgcacaagtgtccacatatccccatgacctactttgtagttcatgtttggggtgcaggccacccattcttagtttctagcctttcccacccatgtatacgcactgtgatctctgactgtaagcgagcatgctaaaaatgtagtagcctacaacaacatcatcactttgttattacctctcatggttctgagggataactgggcttagctggatggttcttgctcagggtctctcatgtggctgcaaccagacagtgacctatactgaagacatctcgaaggcttcttcatttgcatgtgtggtggttggttctgtcatttaatggctcatttgtgtcctctccatgtgactggagctttctcacagcacaaggctgggttctaagagaagcagcttgacagatcctctggaagctgggtcaacttttaggccttggatgtctcacagtatcactttgccatacccatagctctgtctagattcaaggagagggaacatagacctcacttcttgatgaaaggagcgtcactgtcacatagtaagaggagtgtgtgcaatggatcttatgatgaccatcttggaaactctattttgccagaatcctcccattttatttctctcccatatgtgacatatactcatcttttctcccaagaccaccgtatcccataccattacagcatcatctcaaagtcaggatctcatgcactaagtaagatatgctgtgggtgaagctccttggattcctctccttgactaccgtttctgtatctgaagatgtatgaactaaagagacaagttatctgcctcctaaagacatcactttttaaacattcactctgtattgggccctgaatctggcatttagatgagttacttatcaacagtcctgagaagtaagtaatattatccctaattccaggcatatcaaagtaagtacccaagaacttgtagctactgagagtctttagctccccaatgaggctagatgaacacacattatgcaagacaaattataaataccttaccatgcagttaacttatattcagtagtattcatttatattcagtagtaattctgaaagtgtccatagaccacaaggagtccctgaaatattttcaggaaactcaagaggttaaaatggttttcataataatattaagactttacatgcctttttcacttgacatttgcactgatggtgcaaaagcatgagagttaaaaggaaccaggccttctcaaagaaatagctgagccagggactggagcaaagtcagtacaaagatgagccagcaacaatttattaggccagaaagtgagaaagtattcaaggaaaaaaaataatgattgggacacatcacagacataggatacagcttggaaggctcctcctggccagatctgggacaattttaggacaaaaataagtaagttctgggaaataatataaacaattgaaaaaaacacaaattcatgagtttaggccaataaaagatagctaaatagatgatagaaagatcataggagaagaacagagggctcttgcttacagtagaatgctaaggctaattggcacacatggaggggatgctgaaactggagaatcatcattttgcaatctccatagttgcaatctccaaagattggatcaggcaagaaccatcattggatgctaaatctagaagaagatttttatgagaagctgaatttgcatggtcttgaaggatctcaccacacactacttattgtggtaaaagagaaaaataaaataaatttaaaattaaaagagtggaaaattaaagactggaaaactcgaaccatgccttgaataatgataacagttaatgttactaatgaaaggcatatggtgatcgtgtgacttcacatgtggcttctgagaaagacactcatgcagtattctggcataggatgcataatgtgaacctaatcacaatgcaccatcagaaaaacacaaaatgaaggatgctctgtttttttctttttataagtggatacatggaggaaggtggcctctactcttaaaaaagtgtcataaaaaaaaggttgtggaaatgtttcagataaaaggaggctgaaaagacaagagaactaaatgcaatactacctgatactggatcttgtacctgtaaattatcacattaggtcaacagacaatactggaatacagacaataaaaatgttatcaatgtaactttataaagttgataactctactgtggttattgaagagaaaattcctcctcttagcaaacaaatattgaaatatttaagggtaaatagccatgatgtatgtaacttaacttcatgattcaggggaagaaaagaggtggggaaagagggtaagtgataaggcaaatggggaaaaattttaaactggtaaatcaaaataaagagtatctgggtgttccttgaattatttttatttttgaaaatttttaagttaaatatgtctccaaacagaaaatttaaaataacaaaagcaatggtggagcaaagcactggtgttttgaacaaattgaggcagtgcccccaaatggtagtaggtgttgtggtgtgttcttcaccaccacatactcacaatttaaaaaagaaagaagaaagaaagagagaaagaaagaaagaaagaaaggaaggaaggaaggaaggaaggaaggatggaaggaaggaaggaaggaaggaaggaaggaaagaaagaaagaaagaaagaaagaaagaaagaaagaaagaaagaaaggaaagaagaaagaaaggaaggaaggagaaagaaagaaagaaagaaagaaaaagaaagaaagaaagaaagaaagaaagaaagaaagaaagaagaatctggtttaatgtttaaatgttatggatgaaataataagaattattaactttattgtgctctgtgccctgagtacacgtcattttaatattgggaagactcaaatattgggaaatgggaagtatacataaagcactcctgctgtgtgctgaagtgtgatgttgtctcaaggaaacgcaggaaggtgtgcacgtgcttgagggctgagctgcagtcgctgcttctgtccatggaattccattttgagttgaaaggacaattggcaggcaaactacagttattcagacaaatgatggttatcaagcagacactctctcaaatatgaaggaaatgagcctgtcacttcaaggaaaacaactgacaagattttttgctaataataaactttgaggaggtttcatgtgataattagaaaacttagtatctgacactatgacacttgacagcttcccaatatttaaatatgtttctgatgagactggtagtgatattaagtactatgattttgtatattgtaaatgaaatgggtcaatatttggaagatctgcattactcagtgaaccagtattttctgaatgatcaacgcatgatgatacaaaattgtgcctgggcaagcctcattcaaagtgtaagaaatactaatggattttaatgtaactgagtataaaaagtttattaataaggtttcacagttttaagaaactactacttattgagttttggtatagtatcaagaaagaatctccataattatctgaaaggctattaaaatactccttcccttttctaccacacatctgtgtgaggcaagctttttttcgtatactttaaccaaaataaaatatcacagcaaagtaaatccaaaagcagatatgagaatttctatgttttctattaagccagacattaagagatttgcaaaaacagaaaacaacttttgctcttctcactaatgttttttattttggaaaatacagtaattttcgtttttaaaatatatcatttatgttcatatgaatgagtatactgttgttacttatagatgaattaataaataaatatatttaaaatgttaatttttaatatctaacatggaatctacaaaaaaaaaagctctttgggatcctcaataattaagagtataaaggggtcctgacatcattttgtgttcttaatggaaagggtggtaaactcaggtgcctgtgctcctattatggcagctgaagccgtactgggatgctgcctctacaggtgcttgcgttaaccacacagtacagtcaagggcaggcatgtgacctaagcttggccaattggactttttcttctggcattttagttattgaatgaaatgaaactacagtagaagatatagtgtatgttcattcattctagtttttgagaccatatggaggttcctcgtttctctctgttacaagcccagtttcttcagttttcctgtcattctagcaggacaatacatctctccacactcatcaccccccgcatctccatattttagccaccataggattctgttgcctgctaccaaaaaatcttaataatacattaaatctcttactttaccctggaaatgacttctccttgaatttccttcatgctgcaattctgctctttaccttgagtgtctcatgtcctgattcggaaagctttttgctcctgcctgtgggtgacacccaagagttatagcctactcattctagtcaatccattaatagctggaattcaggcttaaaacaactcacattggtaagaaacatggcttctaagacaatttttgtttctcatgaataaatttcactttgtctagaggagcccaggaaatttcctgtttagccaattaaagcccattttgtttgtttgtttttaagtaggtgaagatatttagagatctaataggccctgtagaaataatttattatgtttttttgtcgtggttattgttatatgataaatgaagaatcaaagggacctcctggtgataaaaatgccagatttggaatcagaaaaccagaattacagctgtaaccttttttaaaaaatgtattttctgcttatgtatatagctatacctttttttttttttttgaaatggagcctggctctgttgcccaggctggactgcagtggtacaatcttggctcactgcaagctccgcctcccgggttcatgccgttctcctgcctcagcctcccgagtagctgggactacgggctcctgccaccacgcccagctatttttttttgtatttttagtagaggcagggtttcattgtgtgttagccaggatggtcttgatctcctgacctcatgatctgcccgcctcagcctcccaagtatatagctataactttttaactcacctaaaggtatgtccttgagcaaggactagatgatctcatcaggcccttccaattctagagttatgtaatttaaagttcagcaaagcttcaccaactatcacttcctactctatccctccctagacaagaattgacgcctacctttcctgagcagtgctgttggcaggtaatagcacaggctctggatgcaagtagacaagtgcccaaacctgggctaagtgacctcacctcatctgaaaaatgggaatgatgatattaaggtattgttttgtggattaatgaggtaatgtgcataacacatttagcacaaagcctgtaatagaacaaatgcttggtgaaagcaagccacaatgctattatagctatagctgaacacacttttcacagattatagtcatcccgccactaaatacattttgcagacagcttgctatttcttcttctgtaattctaaatgtgttttacctacaactcagtaggagttaggctaaatttatcgctttgcatggaatcagcaaaaactgtaatagggtatactgtcagtgagtaatggcatatatttgtaaaggatcagtgtttcctgcaaaggagaggaaggattcagcaccccatctagaagagctcctttgctgctgaaattgaatctgtatgctgctcttcagtgtattactttactgtgaggtgactcaggagataagacaacagagcattgtgggcaaatagatcacattcagaagaagctgcctcttagcacttgtttttcttgtgccctgctatatcccttttatggcctgaattgtgtttacccaaaactcatatgttaaaggtctttaggatgattccctaatccaatatgatgtccctgggagaagaagaaatctggacacagacgtacatgagcagagggaaggccatgtaaaaacacagaaaaaaagatggtcatcagaagccaaggagagaggcctcagaataaaccaaccctgctgacacctggattttggacttccactctctagagctgtgagaaaataaatttctgttgtttaagccacccagtctgtgctgttttttatggcagcttgggcaaactaatacaatctccaaggcctaaaaaagtgtctggcacacagtaggtattcaataaatacttgttggatgactacaagaagaaatggagcagttggcagctgacacccagttttaatgaaagcaagtctcagttcacacagtacaaaataagtcatttactgacaggtggctgaaaacagtcacacaagcatgtctggaaactcagaggactctgagttctctgtcctttttgaaactcagaagatgctttggacaaaaggtcagtggggcaaaggcaaaaatatgccagcagcagaatttgcctaacatccattggactgaggactagggccatttaggaatcaagaattaaaaaaaaaaaaaaaaaaaaaagaagcagctgctgcttctcacctctgaagcagaagatgcaaattatatagctatgtcactgagtcctggctaacagagaaacctctcaacctgtttagaagaatccacggccattagtggaaatattagtacatcagagaggttaactttgatgatccccaagcagcacttgtaaaattccatagtttacaaacttctccattccttttcatttttctctgaggttattgtggtaaagcaatctgcttaaggtctcaaattagtcagtggctgtatcaattaagctgatttcagagacaagtaacaattcaacagctgtaaacaattaggaaatttactgattcacataactgcaagtccaggagtggtatgtaattcaagattttttaatctagaagctccatagtgtgctccagagttcagattccctctgacattcacagttttagtattgccctaaaaacagctcccttaatggtcatagaatggaggctttttctttcacactcagtagatgagatggtttggctgcatcctcacccaaatctcatcttgaattgtagctcccataattcccatgtgttgtgggagggacccagtgggaaataattgaatcatgggggtgggtctttcacatgctgttctcatgatagtgagtaagtctcatgagatctgacggttttataaaggggagttcccctgcacaggctctcttgcctgctgccatgtaagacgtgacttttcttctccttcaccctccaccatgatcgtgaggcctctctccagccatgtgaaactgtgagtccattaaacctctttcctttataaattacccagtctcgggtatgtctttattagcagtgtgagaatagactaatacagtagacaaagagaatcacttaaagaagttgtacctgaagggtgagcaagaactttctcagaatccctcagtcagatcccttcttatttgtcagtggtccaatttggattcacatgtccatcaaggaaccaatcattgccaaagcagggagaagattgtcttaagtcaatcaggcacactcctgaacaacaaaaaaaatatggctcccttaaggaggaaggcaaaacatatgtgagataggaaatcagcattgtctaccatggtggttcaactgaaacatgagccaggtccttcctgtctaccatgtcatttcttatctgaaaaatctttacaacttacaagtaattgacaaaatggttaatcacgttgttaaatagctgttttcctcgcaaaaggacagtaagttttctttaaatagtgaagttcttactagtaattaaaagaggctacaatattgaaggttctgattttcctatgatttcgataataagttactaacattaagccatgtcctcctgtgtgaaaatcatcccctccctcgttccaactttcaggacattaaatgtaactgggactactccaggaacactaaaagccactgctttattacaaacggtattttgctgctcattaaagtaggtacatcacacttaatgaaagctcagtaagttataagcaagcattctcaagagtaagtcatcatgactgccaacctggtgctttcagctgtggagcatcccctagggactaggtggagaagtgccggggaagctggagctcctacctacagatgtcttggcactggaggctgctttctttgagcctagccttccaggcaattgatcctgatcctttggctcagagaatcattatcgtttttagctttgcagcaggagaccaatagagacaaatgaagaaattagaaccatactcaggcttcaccaaatcttatggcagagcccagaaaagcccactgggattgctccatagagacaccacagcacttaagcactgacagtatcaggttagactagaaagcgtgggcttccacagggcagaggaaaatggcccaggaagaaggggtgaagcctccctcaaagacaaagcgtgctataagggatcccaaatccaatcaagaacctaaatcccaactccatcctcaatgcagtttctccccctcaattcttttattttgttaatgtcttcatcatctgtcagatactcaagcttgaagcttcacggttacatgtgacttcttctcccttatcccccatttctgatcagctgtcaagagctgtcagttctatctcctttactccttttctttctgcctcttcctctccattctatttgctgtcagcctaattcagaccctcattaactcttgttggattattaacatggcttcatcactggcctattcatctcctgcccctatgctgtccaaccactctattaattgctgaattgattttctttttttttttttttgagatggagtctcgctctgtcgcccaggctggagtgcagtggtgctaactcggctcactgcaagctcgcctcccgggttcatgccattctcctgcctcagcctcccgagtagctgggactacaggcgctcgccaccatgccccactaattttttgtatttttagtagaaacggggtttcactgttttagcctggatggtctcgatctcctgaccttgtgatctgcctgcctcggcctcccaaagtgcagggattacaaggcatgagccactgcgcccggcccgctgaattgattttcataaagcacagctccaattctgtcacttccctgcttactgaaaaactttaaaagtccactttccctacaaaaacacatcacaatccctgtcttagatttaagaacttttgtgttctgatttccccagccttatcttctaactctcccctgaatattctcattctcacaagacttctcaaaattccccatatataccccacgtttccctctctgattcctatccaagagttactctgtacctggaatccctcaaatctccatttccacctaccatttatcctcttagatccagctgttatgttatggccttggaggacatattcaccagttgtgatctatccatcttctgaaaatccagtaagtattacctttctgctgttgcacaaacatctctatttttcaattataaaccatagctttcccactgtattcaactcattttatccattaattatacaaatatttattgagtggggtattattactgctacaggcactagagacatcataatggatgtacaaaacagaccaaaacccccactatcttagagcttacattttattagaggagaaaacaataagattaagaagaaaaatctgtaatatattaggtagtggtgagtacaatagagaaaagaaaaatctgagaaagggaaaggaagtgttagctcaaggggtttgacattttagatgcagtggtcaggaaagcactcattgaaaagatgacttgaagtgaaattctgaaagaagtgagagagccaaccatgcagatatcttgaggtaagagtactcaaggcaagggaaacagaaaatgtgaaggctttggagcagaagcttgcctggtgtgctcaaagaacaggaatgggacctgcatggaatgaacataacagagtgtccctggatgtaaagattgtaattaaagacaatgatggacatagagtagaatatccccaaaagcagacataaaatagtatctattgaaatattgaacattttaaatatatttctgtgcttttatgttgatatggtttgggtttatgtccctgcccatatcccatttcaaattgtaatccccaatgttggacaagaggactggtgggaggtgattggatcatggaggacaaatttcccccttgctgttcttgtgatagtgggtgcgttctcataagatctggttgtttaaaagtgtgtagcacctcccccttctctctcttccttctgctccagacatataggacatgcctgcttcccttgcaccttctgccatgattgtgagtttcctgaggcctcctcagccatgcttcctgtgcacactgaggaaccacaagccaattaaacctcttttctttataaattatgcaatctcaggtagttctttatatcagtgcaagaatgaactaacacagaaaagtggtaccaagagtagggtacctgaaaatgtggaagaaactttggaactgggtaatgggcagaggttggaagagtgtggagggctcagaagaagacaggaggatgagggaaggtttggaacttcctggagacttgttaaattgttgtggccaaaatgctgatagcgatatggacaatgaagtccaggctgatgaggtctcagatggaggtgaggaactcattgagaactagagcaaaggtcacttttgttaagcattagcaaagagatttcagccgttatgcccatgccctagagatctgtggaattttgaacttgagagagatgacttagggtatctggtgggagaaatttctaagcagcaaagtgttcaagacatggcctggctgcttctaacagtgtatgcttatatgtgtgagaaaagagatgatctaaaactggacttatatttaaatggaaagtagaacatgaaagtttggaaaatttgcagcccagccatatggtagaatattaaaaacccattttctggcgaggaattcaagctggctgcagaaatttgcacaagcaaagaggagccaaatgttaatagccaagataatggggaaaattccttgaaaattacaaagaccttcactgcaggccctcccatcacaggcctggaggcctagtagggaagaatggttctgtgggccaggccctgctgccctgctgccctgcacaacctagggacactgatccctgcaacccagccactccagctccagccatagataaaagggcctaagatacaccttaggccattgctccagatggtgctagttgtaagccttggtggcttccacatggtgtttagcctgcaggtgcacagagggcaagagttcaggtttgggagcctctgcctagatttcagaggaatgtatggaaatgcctggatgtccaggcagaagtctgctgcaggggtggagtcctcatgaagaccctctattatggcagtgcagaggggaaatgtggggttggagcccccacatggtgtccccactggggcactgcctagtagagctttgagaagagggccaccatcctccagaccccagagtggtatatccactgacagctttgcaccatggaaaagttttaggcactcaatgccagcccttgaggtcagccatgggagctgagccctgcaaagccacaatggtggagctgcacaagacattggtaggccaccccttgcaacagtgtggcctggatgtgagatatggagtcaaaggagattattttggaattttaagatttaatggctgccctgctgggtttcaaacttgtgtggggcctgtagcccttttgttttggctgatttctccctttcagaatggcagtatttagccagtgcctatactctcattgtatcttgaaagtaattaacttgtttttttttttttattttacaggctcattggcagaagggacttgccttatctgagattagactttggattatggacttttgagttaatgctgaaattagttaaaggacatgagatctggaaggatacagggcagaatgatatgatttggatttgtgtccctccccaatctcatgtcaaattctaattcccagtgttagacaaggggccttgtgggaggtgattggatcataggggtagacctcccatttgcagttctcaggatagtgagtgagttctcatgagatctagttgtttaaaagtgcgtagcacctcccccttctttctcttcctcctgctccagaaacgtaggatgttcctgcttccccttcaacttctgccatgattgtaagtttcctgaagcctcgccagccatgcttcctgtacaacttgaggaactgttagccaattaaacctctgttctttagaaattagccagtctcaggtagttctttctaacaatgcaagaatggactaatacacatggttacaaacagagtcattttttttctacttaagaattctcattccttcttttcatgcaggcttactagaaattgactttcacagtgtttgtttgaaaatgtctttatttcatcttcacttgtgaaagataatttttcagggtaaagcattctatgttggcatcattttgctttcagaaatgtaaatattctttccattgttttttgtcttctatgtttcctgttttcctgttcagaaatcaactatctaattagagcaaagtttatagtttgatccttttgggcttggttgtttttcaaattttcttttccttggttttcagcaggcttattttgaagcatctcaatgtgcttttcttgcatttgttttgcttggaattcatatggatttgtgtatgtatggtttgatatcattaatcaatttggggaaattctcaatgattttctattcatatattgtttgtccattttttttcttttaaaactataaatctacatatgtttggtacttttattgcctcataaattgtttatgcccactctttctttctttctctttctttccttctttctctttctttcttgccttctttttcttttctctttctctttcttttctttttctttctctctctctcttccttccttcatctttgctttcttccttccttctttctttcctttcctcttttctccttctttcctttctatcttttttgtttatttctctctatgcttaatctggacttttctactttagattttccagtttagtaataacctcttcagctatgttcaatctgttacagtttccatttaattctttgttttttaaatagatctcagatttggtgaaagttcccatattgtcatctatttcctttaacatattaatcacagttactttaaagcttatgtctgactaactccaattttgtatcacctgtagttttgttcctatgatttatttttctctttgtcttatttttgatagaaattatactttttgattgaatgctggatattatatatgaaaaactataagcacttccattcatgttattttcctccagagaagattcactcaatcatatatggcagatagcgaaaataggacatgtctccattaactattgctgcgtaacaacattacccagagttaattgcattaaaaaaaaatcataatcccagcactttgggaggccgaggcaggaggatcacttgaacccaggagttcaagaccagcctgggcaatgtagtgaaaccccatctctacaaaacatgcaaatattagctgggagtggtggcgtatgcctgtagttccagctacttcgggggctgaagtgagaggatcacttgagtccaggctgtcaaggctgcagtgagccaagattgtgccactgcactccagcctgggcaacaagagtgaaactctgtctcaaaaacaaaacaaaactaagcacttatcaagcttgtgattctgtgggttaggaattcaggcaggatccagcagggatacctcagctctgctccatgttgtctatagtcacagctggggtgattcaaatggctgaagacaattgggacaacttaaataaagccctatgtatggagcctctgtttttgtccacatggtgtctcctgtggagctagctcctttactcacatatttattccctgggctgggatggctggaacagatgagagttggctagactcactttcaacacattgtggtcttaaggtagtatgacttcttcatgacaagtggcttcccacagagtgggcatgtcagtagagaactttccaaaaggcctaagtgaaagcagcaacgcttcttatagtcttagtctcagaaatcacacaaggtcactttcagggcatatttatacatatggcagattcggggaatgaacatcaaaagaggaaaaaacatagtgaagtagatcatgtcattctaattaacaaattcaaggtggcatttcagactttgaaagtttaggcaatttctgtttgcctccagtcctagagttagcccttcaggggtcacgactgagtccaaggtacttagaacttttcttcctttgtggctgttagattaccatttgtgtctccttactactggaaagctgatgaaactccttttgacttttatcctatgacttttactcaaaatctaggacattttcccttctctccaaaatcttcttcccagaatcttgatttctcaagtcatgtctgcttttgttgtcacaaatctaatttttatctcttcagcatcatgagattcccaagggctctgctggattctctgtctcttgtgtcatttctctgttcagcttctcagccactcatctaacaaagcttatcaataggcaaataccccatggataaattaggggacagaacattgtgcttgcctcattaagttcccttttcctctcaatacgtgcctcaagttctgcataccttgaaagcttccccacttatacaaacatattttttgtgcctttctaattgttcttgacagtaggtttggtctactacaagtgacaccaccatcatcagaagtagaagtccatagccttttatttgaatgattttcactggctcaccactcacaatagctcatgtactgtttctgattatcatattctctaactttgtgacgtattttcaccatatggaatcttcttgtttttttttacccagctttcatggggatgatgatatccctgatcccccaggaccataatgtcccttgtccttgatgcagacactgtctatatttcttttagattcccccaaataaatacccactcagaagatatctagtcacaagcctttggttaaactagagctagaccttttttttttttttttttttttttctgagacagagtcttgctctgtcgcccaggctggagtgcagtagctcaatctcagctcactgcaaactccatctcccggactgttcaagcaattccctgcctcagcctccccagtagcttggcaccacgcccagctaatttttgtatttttagtacagactaggattccccatcttggccaggatgatcttgaacttctgacctcgcaatccacccgcctgggattacaggcgtgagccactgctgggattacacgcatgagccactgcgcccggccaagctagactttaatagcttaccctagtctatacagcagaaccagggtataagccacatcatgtctttcacatcccacttatggtagaataatatactgaaacatgttccagacctatttacaaagctgttgtgtgttctcatactctgattcataatgtattacatgactttaaggttgctgctttgcatacccattaccaaaatagaaaaaatctaacttaataataataaatcggtttttaaaaaataccatctatactcattccttcttccctccagagtacagtaatttttacagcaggctgctaaatatatcaagggataaaccaccactcatctggtggtataaagaagaaagtgaatattaaaaacaaaaatggcaaaaagggcctcagcttcctgcttcacctgttagttttctttcctgagcactgagcttgccaagattgatgtcagatgcagcctcaaactcccctgcattaacagaaagcattaggttctcaggtgagaaagtttttctttagtgacaactcttgcagacaaatccagttaatatgcctgtgtgtgcatgtgcacatgcacacatattcatgtatactaacagcttgatagatgagaaatggctttctgatgatttttaaatcaatttttatagtttaagggctttttttccagaagaggagaaaactttatttaggtagtcaagtgtttgaacttgctgacaggcacttcgcaaataatttttgagtgaataaatgaatgtgaataattgaatgactagtggactcttgcattccttcttcaataaaaaccaaaagcaaagcaaagcaaaacacaacaaacaaacacagaaatccagttctcctaagactagcacaaaaggagatctgctacttggggagcatgataaggtagactatccattttaactttctgctctagatttctcacagcacaggaaaaacaagggcctgtatgttaaaaagttattttactaaagttgggggataacaaaaagaaaaacaaaagaagcatgagatcatctattctgtttggcaagacacaatgttctctgtgttcaaaaattgagttcttaagaatcacaataaaatgatacaggagctgacagataaaatagcctgtataaaaaagaacctaacaaaactgacagaactgaaaaacacactacaagaatttcacaatgcaatcacaggtattaacagtagaacagaccaagctgaagaaagaatcttggaacttgaagactgactctaaaataagggagtcagaaaaaaataaagaaaaaagaatggaaaggaatgaacaaaacttcaagaaatatgggattatataaaaatgtcaaatcaacaaatcactggaatccctgaaaggaacagggaaaaaccaaacaacctggaaaatatatttcagtatatcatctgtgaaaacttccccaacctcactggagtggccaacagtcaaattcaggaaatccagagaacccctgcaacattctatacaagaagatcatccccaagacacaaattcatcagattttccaaggtcaaaatgaaagaaaggatgttaaaggtaaccagagagaatgcacagtggtcacctacaaacagaatcccatcaggctaagagcagacctctcagcagggaccctacaagccagaagagatgggggatctatattcaacattcaagaaaaaaaaatctttaaccaagaatttcatatctagccaaactaagcttccttagcaaaggtggaataagattcttttcagataagcaaatgctgggggagttcattaaccccacacccaccttacaagagatcttgaaaggagcactaaatatggaaaggaaagatcattaacagccaatacaaaaacacatttaagtatacagagcagtgatactataaagcaaccacacagtaataaccagctaacaacacaatgacagtataaaattctcacatatcaatgctaactttgcaaatatgttaaatgccccattaaaaagacataaagtggcaagctggataaagaagcaagattgaatggtatgctgtcttcaagagatccatcttacaagcaatgacagccataggctcaaaataaatggatgaaggaaaatctaccaagcaaatggaaatcagaaaaagcaagggttgcaatcttaatttcagacaaaacagactttaaaccaacaaaggtcaaaaaagacaaggccattacataatggaaaaggttcaattcaatgaaaagaactaactatcctaaacatatatgcaaccaccaaggagcacacagattcataaagcaagttcttaaagacctacaaagagacttagactcccacacaataatagtgagagaattcaaccctccactgacagtattagacaatgttaagcagatcatcaaggcagaaaattaataaagatattctggacctgacatcaacattggatcaaatgtatctgatagatgtctaccaaactctccatgccaaaacaacaaaatatacattcttctcatcaccacatggcacataccctaaaactgaccacacaatcaaacataaaacaatcctcagcaaatgcaaaagaattgaaattatactaagcacactctcagactacagcacaatgaaaatagaagttaagtcttaaaaaaatcactcagaaccatgcaattacatggaaattaaacaacctgctccagaataacttttgggtcgataatgaaattaaggcagaaatcaagaagttctttgaaactaccgagaataaagatacaacataccaaaatctccagaacacagttaaggcagtgttaagagggaaatgtatagcactaaatggctccatcaaaaagttagaaaaagctcaaattaatgacctaatatcacgactaaaagaactagagaagcaagatcaaaccaactccaaagctagcagagcacaagaaaccaccaaaatccacgctgaactgaaggagattgagacacaaaaaaccattcaaaagatcaatgaatccaggatttaattttttgcaaaaaaaaaaaaaaaaaaaagataggccactagctacactaataaagaagaaaagagggaagatccaagtaaactcagttagaaaaggccaagagcatgttaccactgaccccacagaaatacaaacaaccatcagagacaactacaaacacctctatacacacaaactattaatagaaaacctagaagagatagataaattcctggacacgtacaccctcccaaaactgaatcagggaggaattggttccctgaacaggccaataatgagctctgaaattgaatcaataatgaatatcttaccaatcaaaaagagcccagagtcagaaggattcacagctgaattctaccagatgtacaaagaaaagctgttatcattcctactgaaactcttccaaaagaattgaggaagaaggactcctcccctacccattctacgaggccagcatcatcctgataccaaaacctggcagagacacaacaaaaaaataaaacttcaggccaatacaatatccttgatgaacactgatgcaaaactcctcaagaaaatcttgtaaaccaaatccagcagcacctcaaaaagctaacccatcacaatcaagtaggttttattcctgggatgcaaggttggttcaacacacacatatcaataaatgtgattcatcacataaacagaacaaaagacaaaaaacacatgattatctcaatagatgcagaaaagtcttttgataacattcaacatccctttatgttaaaaactcaatagattgggtactaaaggaacatacctcaaaataataagagccatctatgacaaatccaggctgggcacagtggctcatgcctgtaatcccaacacttcgggaggtcaaggcaggcagatcacttgaagagtttgagatcggtatagccaacatggtgaaacccaatctatactgaaaatacaaaaattagccaggtgtgccctctccctctccctctccctctccaggtgtgccctctccctttccctctccctctccctctcccctttgcacggtctccctctgatgccaagccaaggctggactgcactgccgccatctcagctcactgcaacctccctgcctgattctcctgcctcagcctgcccagtgcctgggactgcaggcgcgcgccgccacgcctgactggtttttgtattttttggtgaagacagggtttcgccgtgttggccaggctggtctccagctcctgaccacgagtgatctgcctcgggctcccaaggtgctgggactgcagacggagtctcgctcactcagtgctcaatgttgcccaggctggagtgcagtggcgtgatctcggctcgctacaacctccacctcccagccgcctgccttggcctcccaaagtgccgagattgcagcctcttcccggccgtcatcctgtctaggaagtgatgagcgtctctgcccggctgcccatcgtctgggatgtggggagcgcctctgccccgctgccccatctgggatgtgaggagcgcctctgcccggccgcgaccccgtctgggaactgaggagtgcctctgcccggcggcgaccctgtctgggaactgaggagtgtctctgccccgccgccacccggtctgggaggtgaggagcgtctctgaccagccgccccgtctgagaagtgaggagcccctccgcccggcagccacccagtctgagaagtgaggagcccctctgccccgcagccgcccggcctgggaagtgaggagcgtctccgcccagcagccgccccgtccgggaggtgtacccaacagctcattgagaacgggccatgatgacgatggtggttttgtcgaatagaaaggggggaaatgtggggaaaagaaagagagatcggactgttactgtgtctgtgtggaaagaagtagacataggagactccattttgttctgtactaagaaaaattcttttgccttgggatgctgttaatctataaccttgcccccaaccctgtgctctctgaaacatgtgctgtgtccactaagggttaaatggattaagggcggtgcaagatgtgctttgttaaacagaggcttgaaggcaccatgctcgttaagagtcatcaccactccctaatctcaagtacccagggacacaaacactgcggaaggcggcagggccctctgcctaggaaaaccagagatctttgttcacatgtttatctgctgaccttccctccactatcgtcctatgaccctgccaaatccccctctccgagaaacacccaagaatgatcaataaatactaaaaaaaaaaaaaaaaaaaaaaaaaaatttgccaggtgtgatggtgcaaccctgtaatcccagctagtcgggaggctgaggtaggagaatcacttgaacccaggagctggaggttgtggtgagccatgcactccagcttgggcgacagagtgagactacatcaaaaaaaaaaaaaaattctgaaaacaaacccacagccaacatcatactgaatgggcaaaggatggaagcattccccttgaaaacaaaaacaagcacaagacaaggatgccctctctcaccactcctatttaacacagtattgaagtccaggccagaacaatcaggcaagataaagaaataaagagtatttaaataggatgaggggaagtaaaactatccctgttttcatacaacttgattctatatgtagaaaaccccatagcgtcagccgaaatgcctgttcagctaataaaaaactgcagagaagtttgaggatataaaatcattgtacagtggcagttcctcagggatctagaactagaaataccatttgacccagccatcccattactgggtatatacccaaaggattataaatcatgctgctataaagacacatgcacacgtatgtttattgtggcactattcacaatagcaaagacttggaaccaacccaaatgtccatcaatgatagactggattaagaaaatgtggcacatatacaccgtggaatactatgcagccataaaaaatggtgagttcatgtcctttgtagggacatggatgaagctggaaaccatcattctcagcaaactatcgcaaggacaaaaaaccaaacactgcatgttctcactcataggtgggaactgaacaatgagaacacatggacacaggaaggggaacatcacacaccgggacctgttgtggggtggggggaagggggagggataggatttggagatatacctaatgttaaatgacgagttaatgggtgcagcacaccaacatggcacatgtatacatatgtaactaacctgcacgttgtgcacatgtaccctaaaacttaaagtataataaaaaaatttaaaaaataaaatcactgtgcaaaaatcactagcatttgggtataccaacaacagccaatctcagagccaaatcaggaacgcaatcccattcacaattgccacaaaaagaataaaatacctaggaatgcaggtaactagggagatgaaagatttctataaggagaactacaaaacactgttccaagaaatcagagatgacacaaacaaatgggaaaacattccatgctcatggataggaagaatcaatagcattaaaatgaccatactgcccaaagcaatttacagattccatgctattcctatcaaactaccaatgacattctttacagaacttgaaggaactacttaaaaattcatatgaaaccaaaaaagagcccaaatagccaaggcaatcctaagcaaaaggaataccatgttaactggctttaaactatactacaggactacagtaaccaaaatcatggtagttgtacaaaaacagacacatagaccaatggaacagaatagagaacgcagaaataatgccacacacctataaccatctgatcttcagcaaagctgacaaagacaagcaatggggaaaggactctgtagtcagtaggtggtgctgggataacaagctagtcatgtatagaagattgaaactaaaactctactttccaccatatacaaaaatcaattcaagatggactaaagacttaaattttaaaatgcaaaactataaaaaccctagatgaaaacctaggaaatagcattctggacattagccctgaaaagacttcatgacgaagactccaaaagcactcacaacaaaagcaacaattgaaaaaaggggtctaattaaactaaagtgcttctgcagagcaaaataaactatcaatatagtaaacaacctacagaatgggagaaaatatttgcagattttatatcggacaaaggtctaatatctaccatctataaggaatttaacaaattttccagaaaaaaacaaacaactccattaaaaagtgggccaagggccgggggcggtggctcatgcctataatcccagcacttttgggaggctgaggtgggcggatcacctgaggtcaggagttcgagactagcctggccaacatggtgaaaccccatctctactaaaaatacaaaaattagccaggtgtggcggcaggcacctctaattccaactacttgggaggctgaggcaggagaatcacttgaacctggggggcggagtttgcaataagccaagatcacaccacttcactccagcctgagcgaaagagtgagattccaactgagaaaaaaaaaaaaaaaagtgggcgaagtacatgaacagacacttttcagaagaaaacatatgtatggccaacaagcatatgaaaaaaagctcaatatcactgatcattagagaagtgcaaatcaaaccacagtgagataccatctcacactaatcagaattgctattattaaaaagtcaaaaaataacagatgctggtgaggttgtggaaaaaagggaatgcttatacactgttagtgggagtttaaattagtttaaattagtgggagtttaaaaccattgtggaaagcagtgtggtgattccttaaagagataaaaacagaattaccatttgaaccagcaatcctattactggatatatacccaaaataatataaatcattttaccataaactcacaagcacgcatatgttcactgcattactattcataatagcaaagacatggaatcaactaaaagcttatcaatgacagattggataaagaaaatgtcgtacatatacaccatggaatattatactgccttaaaaaaagaatgagatcatatcttttgcaggaacatgaatacagcttaaggccattatccttagcaaagtaacacagaaacagaaaacaaaatactgcatgttctcacttataagtgggagctaaatgatgagaacacatggacccatagatgggaacacagaaactggggcctacttgagggtgaagggtgggaggagggagaggataagaaaaaataacaattgagtactagacttagcacctgcctgacgaaataatctgtacaacaaactcctgtggcatgagtttctctatattacaaacctgcacatagtaccccaaacctaaaataaaagttttaaaaattcagttctatcaacacataaccctctgaacaaagtacttccaactacctactctgtttccatgtcttagaggacatattcaaccatccctatctgaatgtgccttcccaagccttcgaaattcttccaagttattcaacaaacaatcattgagtactaactctggatcaggcactatctaatcactggcacacaaaaatgactaaaatactatccttgccctcacatatctcccaatcttgtgccagaaaggcacctaaacagaaacccccactataatgtggtatatgctgtgaaagaaatatgcacaggatgctacggtagaacaggtaaagggtatctgatctagtataccctgagatggctgtggggaaaaatagaacagaaattccggaggaagtattgactgaattcactcttaaagaatcagtgaaaaatcacctggggtaggtttgggaaaggaagagaatagaattctaggcagtagggacaacattagcaaatgcatgaagactaaaaacaataaaatatgtgctgataaccataagtagttcactattgctgaaaaagaaagtgacacttggaagaatagcaagaggcatcagggttgggattatgagacctagaaaaccatgtaaaggagtttgaactccatctcctaggcaatgcagaatcattgagtgcttataagtagcagagggatgtggttagacttgttatttagataaaccattccctatactttgttttctatatgtacatttgctatggtctgaatgtttgtgtctccccagatttcataggttgaaactaatccccaatgtgagaggattaagaggcagggtttaagggaggtgattaggttatgaggagtctgctctcattaatggcattagtgtcttcataaaagaagtttgaagaaggctttttgccacttccaccatatgaggacacatagaaggtgccatctatgaggaagcccccgaccccgcccaaacaccaaatctgctggagccttgatcttagactttccagcccccagaactgtgagcaataaatttctgttgtttataaattacccagtctaaggtactttgttggggcaatttgaatggactaatacagccttcctctaaaaaagtggcccatagctttcatcagattctaaaaggtatccatgacccaaaaggatcatggaccttggcatggagaataattctaaatatgaccatttatcagaagtatctgttcatatgttaaaatagtcagatgataggacataccccatgcctattgaatcagacttaggatgtgggcatagaaatctatatgttttttaaagctcctttagtggtgctgataggcatacaaattcaggagccattgatcaggaccaagagagctagatttcaactcttaactgccaaggattcatccacatagactctatctctttttgtttacttgcattatcaatgaccttttccctcgaatgaggtcttaacttcatgtgagaatgtgtccttacttttgaaaactacagtaggataatcattaaattgctggataaggcaaccccaattttcttgcaggagccatggcccacctttagtaatttagttgggtgattcccttagataatctgtgatccaggctaactcaaaaaggtaattggcttttgcatggttatttaaggagcggttttgtagcattcatgtaggatgcataaggtattcacctaaataacatgaagacagttgtttccataattaaagattaagtgatatattgcagagttgttgcctttaagcagtttgaggctttatttttatagaaactacaagatgatgggcgaggaaaaaagggggcctcaaaataaagtatttagacaatgttatgcaaaaaatagctaaaggaatttgttcctgccaatttctacaagctataaataaagagttagggagtgaaaaggaataaaccaacatgtaatgcttctgagatatgcttggcttaaagatacttttttcttcaaaaaggttggaaacagattggccatagatataatattcagtgaaaaatctgaatgttctctttcttacctaaggaagggggtggaatatcatacccatttgttgggaaaactaggtcagattatatccattcatagatgctctaagtcagagctagaccaagggtttgggatcatgaagaataacaaaacatattagtcacccgatacagataatttcccatatctgtcaaaaatgcaaaatgtctatcactcttagccctctcctcccctcccatcttcagaagcagttttgcctatcatgaccatcgtctctacgtggttaaattgtattattgataatgtcaacacactggttgatcctttgactcaaggtgacttggtttggaaatgggttcattttcccactgagaatcttcaggccaattaattcaaccttatttggaaactacaggtaattaattattttttgttaaccttgagcactcccacaagataggatagcaaaaaataaaagatttggtgggatttcacgtgctatatttagtggaaatgtcatataaactggaggatgaaatcttcctacaaaatcaaaatccaatatatggaaagactgctaagaaataggactgtcttacttagtaagagacaggccgtttctgctgtaactttctatgattttaagcatttaggaaggcattccttaccccagtattagtagaatctaaggagtccctggataacctttagggagtccatgaaactctttaatgatgtcatattatgaaatgtcaaatattgtgtgcatgtgcttatgtgtatccctgggccagaagtcataactttaactgaatcttaaagaagtgtgggacccaacaagcttgaaaaccaattgctctagcatttccacagtaatgcaaagcctactttcgtaagtcctgaatgtctccctatggtatagccaatctacttttaggaaaggtgctgtgttgtcttcttattggctaatatttgttttcaaaaatgcatttcgtttattgtctgtgaatttgcatattcataacacatcttaaattgaagtataacatagtaaagtgcataaagagaggttaagtatacaattccttgagttatgacagttatatgtacacttgtaaccacctcccaaatcaagatataaaagatttaaattaccctaggcacttctctcataatgctttagttatttctcacctccttcccaatgcagagacaaccactgttcttattattatcatcacaaattatttttgccaatttcaaaacttcataacagtattttcttaatggcatcttctaatgaacttttcactgaaagaaacttttcatcaaaattgtttatttttatttttattcctttatttcatatttttttttatgattactttttgtttgtcctaagaaatgttttcttactccaaggtcataaaaatagtctccaaccttttcttaaataccactgcttttgatatgttgatcttgtatagtaagaccttcatatattcacttatttctattagttttttgtggattctttggggtttctaaatacttctaagtagaattgaaatagctttacttcatccttttcaatctttatgactttaattttttattattggtattactgcactggctgggattccagtacaatgttgaatagaaatggtgagagtggactttgaactgtttctgatcttagagggaaagtactcaatgattcaccattgattataatgttaactgtagggttaacatgttgagaaagttaatcaggttgataaagtccccttctgtttctattttactgagactatttataataaacagtggttgaattttgttaatgctttttctgtattttttgaaatgatcttattatttttctctttgctaaaaatgtgagtaaccttgagttgactttctgtgtaaatcaaccttgtgtcccaggaaaaaactccaattgatcatgatgtgttatcctttttatacattgctgtattcaatatgctaatatatttattttttgtgtctatttcatgagggatatcagtatgtaattgttttttcttgttatatctttgttggttttattaatcaacattatgctaacttcatacaatatattggaacatgctccctccttttattttctggaagggttcatgtaacactgaaattatttcatttttaaacatttgatataattcattaaaaatccaattgttccttgatattttctaaagaaaaggtcattgttacaaattcaaaaccttaataaatataaggccatttatattttctgtttctttttgtgttggttttggtaaatttgtatttttcaaaaagtttttcactttaacttgttaaatttattggtattaatttttcataatgttctctttttggtctttaagagttaatttaatttaatgagtgtacattattttttaaaataaaaaagaaaaacttgaaaatgcaaattaacaaccacatccccatttgccccaatacgctgtagaccccaccacaaacacaatacagatgagtgaatcaacagtaacgtgctcagagctggggcatgtgactgttatgaccgagttccatattattgtctacacctaatgcaatggtgcaatagagatccatgtgatgtggcacttcaccatggaaggttttgcagattgctgaatcgagacaggcagtggaatataatagaaagcacactcggaaatagattggttgattcgtagatttactagtaattattatgtgaccagggacaatctcttaacttccttatgcctcgtggtgcagcaaaatatcacaaatcaccactaatgaacttactgatataaccaaacaccacttgttccccaaaaacctatggaaataaaaataaataaataaataaataaataaaccaaaatacctccatattgaccagataaggaaactgaggcataaggaagttaagaggttgtctctttttggtcttctaataccttctaatacctgtatagtgatgttctctcttttgttcctcatattggtcatttgtgtaattaaggtctgctagagatgaaatttctcaactattgtctgtctgaaaatattcttgccattcttttgaaggatttttttttattagactttaagttctagggtacatgtgcacaacgtgcaggtttgttacatatgtatacatgtgccatgttggtgtgctgcacccattaactcgtcatttagcattagatatatctcctaatgctatccctctcccctccccccaccccatgacaggtccccgtgtgtgatgttccctttcctgtgtccaagtgttctcattgttcaattcccacctatgagtgagaacatgtggtgtttggtttttttgtccctgagatagtttgctgagaatgatggtttccagcttcatccatgttcctacaaaggacatgaactcatcattttttatagctgcatagtattccatggtgtatatgtgccacattttcttaatccagtctatcattgatggacatttgggttggttccaagtctttgctattgtgaatagtgctgcaataaacatacatgtgtatatgtctttatagcagcatgatttataatcctttaggtatatacccagtaatgggatggctgggtcaaatggtatttctagttctagatccttgaggaattgccacattgtcttccacaatggttgaactagtttacagtcccaccaacagtgtaaaagtgttcctatttctccacatcctctccagcacctgttgtttcctgactttttaatgatcgccattctaagtggtgtgagatggtatctcattttggttttgatttgcatttctctgatggccagtgatgatgaacattttttcatgtgtctgttggctgcataaatgtcttcttttgagaagtgtctcttcatatcctttttgaaggatatttttagagggcactttttatctttgattctcaataacttgactattttgtgctcaggtatatttttcttcatatttatcctgtttggaattgattgagtttcttggatttgtgagttaatctaaagattacatccatttttgaaaagttctcagccattgtgtcttcaaatatttttttctcccctattcactctaacctcttttttggaggactctaattatttaaagttagactgttagatattatccttctcttgtggaagctctctttgtgttttaaatgattttttctttttacatttcagtttggataatttttattgatatgtctttaagttcactgatttttttttttttttttttttttttttgagacagagtcttgctctgttgcctgggctgtagtgcagtggcacgatccggttcactgcaagatccgcctcctgggttcacatcattctcctgcctcagcctcccaagtagctgggactacaagtgcccgccaccacgcccagttaattttttgtatttttagtagagacagggtttcactgtgttagccaggatggtcttgatctcctgacctcgtgattcgcccgcctcagcctcccgaagtgcttggattacagacaagttcactgattctttagtctgctacattcagtctgttgttaaacccatcaaacaaattatttctgatatttctatagaatttccatttagttcttttctatcttttcatgtttctgcttaaactcctcagcttttcaataatgttgtgcattgttctcactagattatttaacatatttataacaattatcttaaagttattttctgctaattccaacagttgggttgtatgtggatctcctctattaattttttcctctttatcataggtatatttttctgtttctttgtatgtcttgtaattttgtattatatactagaaattgtgtataaaaatgatagttatgactgcagtaatactgtgctcagaaaatatcatgcttcttcttctgttaggctgctggtgagagatctcaatctgatttgtagttgagcagggtctgggcttcattgcagctttagttagattctgttcaccactggcttcaaatatttgaggatggggttgagactttcccttcagtgggctttggatctcagcactaccaccaccagactctaaaggtctctatagcttacagttcagcttccagaattccaagtaccatgaaaatgctctgtgctttatagttcagctgccagttttttggggaacagagaaatttcctttgcttttcatctctacccctaggtctccttaccttgggagatctatttctccccaggctgttacacactgctcccagccttcagcaagacattgcattgcacttgatgacagcacctcagggcatctatctcagcaatcctgccccttccccagctttcattaagtcactactttgcatttgattaaggtcctgtgtaccttcaaaatagactctctcagccctcatgccttgctcccaggctttagggaattgctgacttatacttggtgaaggtcctgtgaacctcagggttatttttcttaacttccttgtccttgtccttagcctttgattggccagtgccatgtattcggcggaagttcaatatacctgggtggggacatcttttctgtgtgcttcagggaaatctttctcaactttcttgctcttcccctggtctttagtaggccaccgccttgcactgttatggtcctctgcatcttggaatggaggggatctttctcagtgttcttgccctgtcctcagtcattggtgggccactgcattttacccagtaaagatccagtgtgcctcaggcggatttctcttggacctcctatcctgcctctagcattgagtatcctgctacttccacttggggaatgccccatgggaaaaaattggcaggtgggtaaagatcaatatttgactggattaccttggaatttgaatttctcatgccaacccactgatggccactaaaaatttgttagcagtttacttgatttctccttaccccactctataacggagtaacaccctagagttactaggaatgaaagcagtcataggacacttttctcctaggaatgcattgtgtcttcctaagatttggtttatttaaatttctttgcatcttctgctctctgctaggctttaagttgaccgcaatattgcagcctattgaacttgtactcattgtactcattataaggatgagagtgcaactcctgtaactttctacatcgtaaccaaaaatttggaagtcaattatttcatgcccaaagtcttcagagccagatcttctctaacgactttgaaaataatatgctttctactatcctccacatgctttctctggcaagtgcaatagaatcagatatgacccacacttcagtgttttgcactgaaactttttcattagggggaaggaagatgagattcaagagaactattattattattacttaaattttttctgggagtacctgctgttagccaagcagtcatcctgagccctatcaaactgaacctactaaatctttgtgttatgacaatgtctttcacacagatttagaccctcacttttctatctgccacttacttctggtggaaggtgtccattaggtccctttgtaagaaaaaggtttacttcatacccttttcagctagttaaatccctactcattttttaagatgtcagttaaatgcatatcttccatgaagtcagccccagcatatcttacagccttgctacactgctagtgtaatcatcaccattttctattgtgtacataatgctaggggaaatatgagacctccttcttaaaactgcccacagggtggggcgtggtggctcatgtctgtaatcccagcactttgggaggccaaggcaggcagatcacctgaggtcaggagttcaagactagcctggacaacatggcaaaatgctgtctctactaaaaacacaaaaattagtcgggcgtggtggcgcatgcctataatccctgctcctcagaaggctgaagcaggagaatcacttgaacctgggaagcacaggttgccgtgagctgagatggcaccaccattgcactccagcctgggcaacaagagtgaaactctgtctcaaacaacaacaacaacaacaacaacaacaacaacaacaacaacaacaacaaagtgctcacagattatctagaattgggtttccgtgacctgacaggttattatctcccttggagtaaggatgaggggctagactagcatcttccaaatcataggtcctatgagggtaagagaggtgggtttccctaagagaaaacgggctgctcttggcaggaaagggcactagctgccaagggggtgatatttaaaatgctttaattaaaacttagttgatatgaatgttaccagaagaaaaagacaattgagaggaatgcttaatttgtacgtgtttcaacctaaaaacaagacacaagcgacatggtacccaggaaaaattttccaacatccaataagatggctaataccagtaaattggtctctgcaaggaaatgatagccaactttttttctttcttaaccactgaggaccccttggttaatttcacttccctggaccccaatttatttcaaacactttggctgccaaactgcaattatcaaaaaaatattaaaccacagactcttagcaattatagctcagcattattttcccttctttttaactgcgtggcaattaacctggtggccaaccaaaaataaatatactaatttccttatttaaattctacatagctttttattggagaagtttagattttctactagtagactttatttttattttttgagacagagtctcgctctgtcgcccaggctggagtgcagtggcacgatctcggctcactgcaagctccgcctcccaggttcacgccattctcctgcctcagcctcccgagtagctgggactacaggtgcccgccaccacgcccagctaattttttgtatttttagtagagacggggtttcaccgtgttagccaggatggtctggatctcctgacctcgtgatccgcccgcctccgcctcccaaagtgctgggattacaggtgtgagccaccgtgcccggctagactttataatatattgaaatatattgtgaatatgcagtgaagatctttaaaatagttacaacatttgacctgccaatttcatgtttattatttgtcctaaaacagtggtcagggatatgaacaaagatttatcttgaggaatatttaccactgcattcattacattaaactgttgtttaaatgtttaccatacaatagtaagaaattacaaaacacctaaatttccaagagtagaagttgagtgaaaacagtatgaaatataggaaatggccagacaatggagcactatgcagcattaacatttgattagataagatgatttaatgacatggaaatatgttctctatacattaagtttaaaaaaaatgttctaaaatgacatctttggggagcagccaaaatagcctccaagtctccttctttatagcttaacatttttttctgctctaagatgggatgctacgatcctgtctgattaaagacacattttaggcctgttttaccagcatatttggtcaaggaaaccaagttatttgcagtttagtttggaacagaaattcaaacttggcaaataatttgcatattgacagaagcatgttttctttctttataaaatgtatgtcaccaagaaagaaacaataattggcacctaaacttcatttcagtactgagctacctcaattacattccactaagtagaatgaaaaacaggccatccctcaaaggcagacaaaaaaaaaaaattgtgacttagcacaatttctgctgatggatttctgattcctgaatgttatgacgatttcatgttaagaggcattaaaacatgattataattgaaaacaagagggcctgtgacactagagggaccacggtttaatttggattagtattaaggtcctgaacattaaactaagaatatttcctcttcaacaggttaaaataaactattttggcaaaatattaactattactaatgggtaaaaactacatattgcttgtaccaggtgctattttaagaactttacatttattaactcatttaatcctcaggagaactctataaagtatagactactacttacctgaaaaaactgaggcacagagagatcaggtaatttcaatgaggtcacaaaactgtgaagacaaagagtcaagattcgatcccaggtggttgggctccaaagactgtaattttaacctgtaaacttggacagtttcatctgcatgaggccaaaagctaataaaaaccttgaatccactctagtaggtgagtacctccactgtatcctctaaagcatgtttcagcctagaggagtacccaacctagtctaatttctcccccaatattttgagttcctgcataccacagaggctgcacaaagtcaggggaggctaacgtaggatgacgcaggcatctacacataacttgtcattttctcatctcatgagtggactcagtggaaatgctcagaccataaatcaacaccatctgtaattgaggtttgctcaaggtatctttgcatgctatagcattcattgaaatatctgtgaggtaggttagaaccaaatttaacagttacttctccaactagccttctcatttgttctccaacttgggaatgattctatcattagacacaccctggggccagattttacaagtggcactatcataacagtgtgccagcttaggacctgagttcaccacattcctttctgagcctactctgatgatttgccttggactggccttgtccaagctcaccttgacatctgccttgttcagtgctcagtaggcagttgttgtttagaaagtctttgtaagtaactattttaaagtcaccattttacagatggacaaagtgaaatacagaacacaaaatgtgattgatgtcataaagcaaatcaatgctcccaaatgcaatttgccattcgctctcctgtaaatatgtgaaattggtgacttaatgttcttactgtaaaaatgcccaaagaaagagaatagaagaagagtaacagagttgggggagagctaccactggaatggaaggagcgagggaggaaaataggaaaggaggaaggagtattgcgagaacataaaaccttactacagtggccctgaatcatggagctgcaacacacctggagcacttataaattcttttgagaaatgccagtgtgacatacgcctcgcaagccagcaattcatgaactcgatgcagtagttgaaaccaaaggggtaatggccacagctgtcaggatccagatgctctggggctcggccctgccactttgtcccagcattcatgcgaaggaatgctgtgaactgggcatatcaccactgttcaccctggcctgcttccaacagcaccggctgcatctggcctggaagatggccatggctggcggccctatgttccccataaggttgggcactgggctgcagccaggctgcgagtgctggacctacatccagcacactctccgtccaacctcatctgcctgtctaccccagaacccccaaggaagcttggcctttcctggcacacagaatcctcctgagaactggcgtctttctgcagtcaacagaaaagatggaatgaaaaccacacagatgaaaagtcatgtcatttattaataatttcttttttttttcttctataaattggaaggaaaaagtctttggtgacactctctataaaacaatctatcttggatggcgaaacccagacataaagttacacaggtcagtgaagtaaatcaatatctatggctttgtattttctcacacgcgctctctcacacatacttgagggcttaattacgctaagtcattaatactctataacaaatgggaaaaacacttcagaaaagacctgtggtgacactacaaaaacattggcaacatattagaaaactctgtcccaagtgtacatcgtatacaaaataaggtatacttttgttttttgcgttacaatttgccacctaaaatagttccagtttttgatgtctttctttctgcccctcaacatatcctatacatattgttctctcaaaataagtacacaaggttcattacatggtaaccaggtcatttgcatagccctagttttagtaatagttacaaccgaaaggacagggatgtattcctgtaggagaagaacagaaaactattgcagaaatcaaatggcctgaggcctaaaaggcaaatcattacaaaaccagagtgactgaaaggctagcctgacttgattttaaacaagggtgagactgtgctatcctgagggctcagctttctcaaggtttgccttcttctcctagttgctgggccatgttaagttccaattctgggtagctcactgaggttcctgatataaaatgtattggaactctagaccagtgacaactacaatccctactaggtaaaactcatggagacaaaagcctttgatttttggaaagggcaaaaaggggagagatggttttgaggagtcaaatccatcatcacaattatggtgtaaataacagcttttttatccagaggttctgtacagcattattgaactgatgggagagaccactatcttagggtacttaatcccccaagcttttttttttttttaaagaaaaaaaaaaggggggccaggcgcagtggcttacacctgtaatctcagcactttgggaggcagaggcaggtggatcacctgaggtcaggagtttgagaccagcctggccaacatagcaaaaccctgtctctaataaatatacaaaaattagcccagtgtggtagcacatgcctgtaatcccaactactaagcagggtgaggcaggagaattgcttgaaccggggaggcggaggttgcagtgactgagctgagatcacaccaatgcattccagcctgggtgacagggcaagactctgtctcaaagaaaaaaaaaagacttggtgtcaaaggataaactaatctctttatgctgaagttcttataccaagtgagacaagtttagcacagtttgatattaatgcttatttgctgagaactcaactcaaaacaactttgtccctgtaagcatgcctgagaaaatgaggctgatagtgaaagaaatttcttggttaaatctggccaagaatgacaaaaccaactgaaaggttcttgtccatagtcgctgtaaaggggaactaggtaaatgaattcagcaactgcggtcctgatgtactggctgcatgttgattatattcacaagtaagaggcaggagcatttttatttgagagttcatggcaataactgctacttttaaatactggagatctcaagagacccaagggaacacaagacacttccaggtctgggaagtttgcttggcttttgcatccataattcagccttgtccagcaagaatctcattcagattccaacctagtaaggctgtcttccccctgatcctgccctttaaacaggtttgttcttaaatcaagtgccctgttttttttttttttaattaaaaaaaatagtatataggcctattcacattcattcatctcacccctgattaaagttcagtaacctttatgaaaggccaccagcataatactctttcaagtcaccaggtatttgagaaccaccaaaataaaggctaacatagcctactgtaatgaaaaccaaaagtcattctaaaagggaaattgaaggatgcaaccggattgatccttctttgagcaccatttgtcacaagaagaaattaaactgtaatgcacataagattccagtaacaagctttccctttttttttgaagcatctatctgaaagtgtgttgatacgaccaggtaggcccacctagctatgctatcttttgtggtatgactatcgtgattatttcatggatttttctctacagtctcaattttgagccattttgctagcttcaacaaaggtgatatgtattaatgtatttgtaagctttgatatttataacactttcatataaataaatacacagccagcttttaaaaaattacttttaagatcctgtgtcttaatgtggagctgggaaaagatgctgtgtggaaatccataagtggctgagtcctctttggaatttctgcaagcaattcattacgtggttggcactgtactctcagcccttggcttctctccaatgcagcacatgttagcccacttagggacccctagttatcattaaagttgaccaggagataattcctgacaccctacagagatggctatgatttgtcaacttgttgcaatgcaatacaactctttcctaactgaattaaaattacatattactgtcgagcttcactgatttgttaagcattgttctattcccagccttatattccaaatgggagaagaacacgctagctcacatcccaaagagatttgctcagagaatgacataaaatgaaactgtggagatttaaagtggatgaaaggtgtgttatatcctgttcttatttataattaccatttttcttcacataacacatgttgtttgtggaggatatgtgttgtgagcttggtgacaggtcaatctggcaaagcaggtccttgaatccacttgtgtgactgactggtacaattagggacattgctttgcaagccaatatgaccacctaagtttcaagttggttttggggtcattgaacaaaatatcgcatttattttttggtaaaggagaaacaagaataatttgccaatcctgaaaaaaataatttaaatacaaattcacaaaggccaaatgaataaagattaactgctaatcttttaacttgctgagaagtgcagcttaaatgacatgaaacctgtaagaccaaacattttatagaaaagacacaagtgcaagcaccatggacctaagaattatttttcaacaaatgcctaagagataatcacatctacttaggggaaaatgtcacatgtttgagaatggactatggatgggtccaattagatgagagaggtatttagggagctgttctgagtcatgaggctgaggagaaaatcctctctttaattgaatttcactgtctacgcacctctcaaaacaccatctggatatgtgggctctactccttgttctgcagctaggtagcctgttgagtcacttctctggacttccacaaacactttcactcctgtttacagcaccatccccgtgctatcattacaagctcctcttcctctcccagatgtctacaaagaaaggatgaggtaaagtccaatggacttacggtttccactgacctaagatggccacttgaaattatcagaacaaaattctctgatgaacttttcttctaaaacaaaactgaaaataaatggaaaagaaatatgaaatgtatgagagtttgagggagggactctaaagtgcttattgtttattcagcataatacatggtcaaactcaataatgtctttctcttccctgttttctctggcctcttccaagtagaagaaagcatttaatatcagaagtctccatttttcataacagagttagggatatgttttttttttcagtttatacttggagtttaacaataatcataagcccaagatagcattttcagggatagaaatgttctttttaacaagaagcacaactaaacttttccacagatttaaaaattaaaagtaaatgaaactatattcacatttgttgttgattattttgtttgccagattcttgctcaaaacaatgtttgaccaaaaatggcattagggtcccaatggcgagacatctcctcagttactttgcagcaatcctcttgttcattggtgtgaatttctaccttattacccctttttctttctcaaaagagaaactctgaaacttgagattctcacaaacattaaagagttcatcttgtaaataatctgttctccccaatatactcattattccttggcttctaaaccaaagcctcttcccagtgctacgcagacttaggtcaatggttgaatctataaccgtgcccccaacccctgcaagtattgggttactgttgtgggtctgtatttccatctcactaacatgctggtgggttatctggatagttctttgtgcaaactgaacatttcttaattatactagtgttttcttggtactaattccccccacccccccaatgaaaaacgattatcatatatatctatctcaaacatagagatttcagttagaactgcctacctggaagtcgtaatactttctttcatgcagcgacattttagagataaaagttcaagtggatttgaagattcgaagtggaaaacaatttgcactggcaaagttgaataatgaagttacaacttatgctcagttatttcttgataatgggtagagtgacttattgtgttttccacgaagtttgagcttttgaaactgcagggcaccctacatggccatgacaatgatgtctgtgggaaaaggaatagcagctttgaaatattcacaaccaacacaattttgattaaacaaagaactctggtttttaatagttttgatcattaaaaaagtttaaacctgcatagcaatcatttcaaaaataattatttaatgttccataattaaactgtacacaacctagtcttgggacacagaagccagtgaggtgagtttggagcagtctggtgcagtcccaggagccaggagttgagttctcattggcctttttttttttgtcattctgctcatctaagtttttggatagttggcacaatctggctctgctgatgagtggatctgcactgggaagagagagcagcttgacccccatcccttcttgcttcccctcccccactcagccggattcctcaaagtcgctcaatgtctcggtatttcttcctcaaaatagagacctggtctttaaagaggacggggtcgagcctcatctgagagtggatcagcggcatgtagccaaaccagctggcaaacgtattcatgcagctctgtcgctgggcaaagtggtcagggtcagcccaacgggaagcccgagaagtctagggagaaggagagaaacaaggataatgatgagagaagtgcaaggtgagatggaaacattgcagaaaatggagtcaggcaaatgagcaagcagcaaagcttggggtctggcccggccaccaagtctcaccatctatgcacctgctgaaaatgcaatcgctgatattggtttttcccaaggtatgctacgttcctcagtgttaaaaacacaaaaacaaagattcatgttgactttaattctctaaaatttattgactaattctctggtcagtccacgacttagcaactgaaactcgactactacagtgactcaatctaaaacctctctttgcacttgggaccaagtactaagattaaagatgtgtttctgctttcaaagagttttctaaatccttcctgtttatgtagttgatttagaaatacccaccaacttttagaagtctatctttctctctatccatcacttccttccttctactatctctttacctttataagggtcctactaaatcctttgttaaaaattcacatatatagttgaagaagaacaaaatagtgccttttacatgtcactcaaggctagtgttacgcagcatctaaaactccgttttctcttctgtagcctccccattgacgtgactccatgaggatgagaaggtgagattcagtggtatatagagcatgttgctgtatgactaactttatactaaaatctcaaaattctgttcttctcttaacccaagaattgttggctttcctgcttgactaaaacccccaaaggttactttttaaagggcaatcagccctccaaagaatcactgctcacccagaataaagattaactctcgacaaatagaaaagatggctaccatgtttttagctctctgtgttgcccctaaagttggttaaatatttttagatcatgcaaatgattggcattgatttaaaaagaatgccttaatgactggagtgctgaaatttaaatagaatgactaagcacattgtctttcaatccctgtttttatgaaacatggaaaagatgggctgcccaattatgggggaacccccacaagcccatttatgtcaataggcaagtctttaatgatgtatatgtatgcacgtgtgttctgtgtatttgttgtactcacagttttagaaaaatactttcatgggaagatacattttagtgtgagaagcagtaagagtcacttcagaatcatagtgtcaacatgctcgaaaataacattgaagataaacacaaatgtcaagttacctctgaacagcagaataacaaacaaaacactatttgtaaagtgttttcatggagttcatttgaatctcaccacaatctggtgaagtatctacccaggtaataacatccccattttatagctgaggaagcaagtttaagaaagttagagttatttgttcaaggctagagaggggcagaactcaagcttcattcttcagcctttatatgaggggaactctacttgataaatcagagaaagatatcaaatggagctgactggttgagttcatatcagagtagacaatcccaaatgtaacttgttttgaccctaaatggatatgagtttgtgggccatttttttttcttttttttaaaggcagagtctcactctgtcacgcaggctggagtgcggtggcatgatcttggctcactgcaacctccaccacatgggttcaagtgattcttgtgtctcagcctcccaagtatctgggattacaggtgcacaccaccatgcatggctaatttttgtatttttagtagagatggggttttgccattttgcccaggctggtcctgaactcctgagctcaagcaatccacctgctctggcctcccaaaatgctgggattataggcatgagccactgtgcccggcctgtgggccatttttgattggcccactcattcccaaagggtgctgtacccaggcaaaatactcatatatgcaactagaaatactgtctagagtttacactcattcctattcaaaaaattttttttaaagttcagttgaatcattcaggtatcgttttgcttctagatgttaacatttattctgagtcaaccaacatctattagaaaagatgcctttcttatgtaataaaagcctaatcctagaggatgatatctatttactttaccggtcatacaaacattcaataaattaatgtgtatgatggaaagaagggggcaaatatagtacctgaatacacctagttagacctaaggttaaatttagatttttttgttaaagatgtatgaattactagaaatactgtttggtagaattaggctaatctatgaaaatagcacaaatccaccccctaagaggccttgtatgactagaattccccacttagtgagtgttctgaagaactctgagtaaaaaaatatttttaaaatgtcatgtccttaaatgagataatatacagtcatgcaccacataatgacatttcaatcaatgttggatcacatagatgactattgtcccatatactgtaataccatatttttattgtaccttttctgtatttagaaatgtttagatacacaaatatttatcactgtgttacaactgcctacagtattcagtacagtgacatgctatatatgttatagcctaggagcaataggctatagtaggctgtaccatatagggctgtgtaagtacacttgataatgtttggataatgacaagatcaccaaatgatgcatttctcagaatgtatcctcattcttaagagataaataaaaaatataaataaaaatgtttgggcacataatagacaatacatcttgcttgaattcgaatattctctcagccttaaaaatttttacaaatcctcttatctgttctttctgtaattagaaggaaacagaattttctgccagactctttgctaaggacagctctttcatcataaccaatacctagaacagtgcctggtaacatgctcactaagtactaaataactttttataaactttaaattctttataaactttaaatttttgcttactaaatttagtgaatgaaaaactatcagcttaacatgaggcctagctaagatttcctttgcaaaagctagatttgtatatgttttccaatgcctgtgagaacaaggcacatgcaaagcccctcaaaattgaactaatataaccatgttaaagtatgttcattcagattaacctcaatcctgttggatgctccatgatttaacgtgagtgaatcttaatgctctttcttaaggttttttgtttcttttttctttttctttttttttgagacagagccttgttctgtcacccagcctgaagtgcagtggcatgatctcaacccactgcaacctctgccttccagtttcaagcaattctcgtgcctcagccacccgagtaagctgggattacaagcgtgcaccactatgaccagctaattttttgtatttttagtagagatggggtttcgacatgttggcaaggctggtctcaaactcctggcctcaagtgatctgcctgcctcggcctcccaaaatgctgggattatcagtatgagccactgtgcctggctaagatttttgatttcttacatatagtaggggctctgctcaagatgaataaagatagatgaaattcggcatatccaggtggacctgataccaagatggtggggtgtacaaggacaagcagtgaagtccacagaccctgggattcaattcccaattctgtctctaacttactgggcaacttgtggcaatatgcttaaattcactaggtcctagttttcttacttataaaaagaaaatgttggattctatttccttgaaaatacctttaatactaaaattgtataactcaacacaatattttacttcacttttataaaagctttcaaacatattatttcaaccctgtaaggtagatttcaccatttccatgttaaagatgagccaactgagtttcagaaggttactgacttgcctgtattttaaatcctgattctagaactgaaaattaaatattgtgattcctgttatgtcaccaagacacaattcaactcaactgcaagcaccagaaaactgtgttaaagagagtatggtttgctagacattaaataaggtacctacaatcaactttcataagttatttgtagggctttaattctgctgagggctgaatgtttgtgccccctaatatttatatgttgaagcttaattcttaatgtgatgatatttgcaggtgaggtctctgtgggatgattaggtcatgagggtggagtcctcacaaatgggagcagtgctcttataaaaaggaccctagagaactctcttgcccttctttctgccatgtgaagacacaatgagcagagggctatctatgaatcaggaaacagtctcttgtcaggcaccaaatctgctggtgccttgatctgggactctccagcctctagaactatgaaaaataaatgtctgttatttaagtcacccagtcaatggtatttttgtcatagcagcccaaatggactaagacaaactctaaagacatatctttctcatgtcaccttaaagattataggagagctttacatccttggcataaagatactcttaacttgtgtcttcctaattatccctgcaccaatcatacactcttttctagctttcagatgtagttcattcctggtttctcctcattatatgctcctgggtggaacagctagaggaacgtgagtcctcattacctggggctgaaccaccagtgagtgaagcaagggaagagggctcttctatacttacctgtcccatcattgtctccttatactgcttcttctgggtcactttgattggaggcaattttgtcacagcagacaccaggaagttcatgagaatgtcctcacaattggccaattggtccaccatgttcttcaggctggctggcaggtaatgggagtataggtagtgataatatctgtaaaaatcaaagatgggtttcacagggggccattatcacatgatgacaagtggacttctgagacagaaaacacatacccattctttgaatccctaaacatgtcatgaatggtaatgataatgatgatgatgatgacgataactatcacttctatggtacttgttatataccagatattgttctaaagtgttttacaagaaatgcttcatttagtcttcataaggagcctacaaggcaggttctattattactcccattttacagatgaggaaacaaggcacagagatacagacatacagacattgcttgtccagtctaactctaacatcagacaggtgagttagaaagaagaactaaataattagatggcaagataagttatttacacatgatctatatattataaagctgcttaacaattttaatcattggcttaatcagaactgtatttaatattatcccttgactctgagtccaacaatagactgttctatatttgtgccctataaaccatatatatttcaatcctgttagagcaaaatctgaattaatggggtggtcaatcgtaacagaaaacccataattaatttgaattatttctcatcctactgtttttaaaatgtatttatatacatatagcatatatttataggaaaaatcatttgagtgaatcaaattcttagagtggtggtggcagaagcaataggaacaatgaactttcaagaagtgaaatcttgagaccaagaatcagtcagcctaaatgtttatgccttgagcatttccaagctatccctgagatagcaaaattccctattctttactaaaaagactaaggcaagattggtgtgttcactaatgatagaagagcaggtattttgttactggttgagtggggaatgttagctatctaccctcactagtttggcaatcttactccagtcccctggctttaaagaccaaatatatgcaaacaactgccaaatttgtatctccacccctgagctttttccatatatccttttggatgtcttaacatgtccaagactgaacctatatattttccctcatacttgttccatctgtagttttcctcatctctgttgatcagccctctaatcttccagtgtttcaggtcaaaagacttggagtcatcaaactctacatccagactctctaggcatcatgctaaagcatcttcaaaataatctgatcactacttaccatggccaccattcacttcctggtcccaggatcccaccatctcttgcctagataatgtcaatcacttcctaatagggcttctgcttcaactctgggtctgttatagcctcttctcaacatagaatccacagtggatgcataaaagaaaagccggatttctcctccctgttcaaaccctgtcctcctcccctgtcacttagagaaaaagtcaagtcttcatgatggacatcaaggtcctgcaggatttatcactgtgttaaaactgcctacagtattcggtacagtgacatgctgtacatgtcacaccctgttcaaaccctgccctcctcccatatcacttagagaaaaagtcaagtcctcatgatggacatcaaggtcgtgcatccatgccccctgacttttctgacttcctgtcacccattccacccagtcacagtggtctcctcgatggttctccagtattctgcctcagggcatttattctcgctgttctcctgccacaacactcttggtgcacatgtcctcttgacttcctgtccttcaagtctctgctcaaatctcacctgtgcaatcagaatcaccctggacacccccaatctgccccatctccaccttcagcacccttgatccttttctacactttgtctgttatatcacttatctccttaataaactatggaattattatgtagacagtctttctttgttagaatataagacctgcattggcaaggaattttttctgctttactcagtgatgaatcccaagcacctagaacagtgcccttgggtgctgacttaggtatttacttttgttgttgttattctaaatattcagttacctaatatgccctgagagtattttcacacttcagaccaactgaaaatgttactctaccataatttctggaaatgaaacatgccaagaggtttcactggtttcaaaaacacacatttgacacatcagcaaaacttaagcggggatacagactaattttcctcaatgctgttaacaagatttggccttagttcctatttatgcagcagccaatataaaaagctatgtaaagtctgtaagagacatgtccagattcctcacttgtggtaaatagcagctcctgtcaacaccatggagtagtcgttcgtccactttgatgtgtatccccaccgctccttagagttatcccagaagtggctgcgcgcggggtaccccacaatcctctcagggaagctctgccacactgtgaaggcgaaatccacctgcaggcagaacacaagccaaacaagcaatcaacagtgttaacaaatgtcaacaaaacattaccttctccccactaattcataatgcaaaatccggggactgtggcgaaacattaattctatgtattcatcagcaaattaaactgactgcttgacattttgccccataattatgcacattttaatgttttctgttaaagaaacttcagagtagtatggaaatgaaaggaagaaaaaaatttgctgatatgccctttaaaaatccagtctgttcaagctaaaacataagttgaaaaagcttcttttcccccttcctcaaaggtgcacgtgccttgattcacgtgagacacaaacacatctgttttataaatgagaaatttcccatgtatatccaaagaatgaatatacaacatatatcatacccagcatatatcaaagccaaagtgcctaaaataaaagcaccctcttaagagtaagagaaataactttaaaaaaaaaacaccacaagttctaacaggaatacagagcaggtatcataaagaaaacataattcaggcttcttaggtttgaagatgcacagtttaagagacactagaagaaagcatcaacagtgaaaatcactaagaataagtggggacaagaacaactgaagccacagaattattttaaaggaaatgcagctaaatgtctctccggtgcttatagtagcccaaagcaggtgcttctgaacctgctataaaccagcacttatagttagcaagtgatctgttttcaaatgcataaactcacttctgatttctatgatcatttgatgaatggtaaatcaaaataataaacagaaaataaaaataacaaaaatagtgacagcaaacaatcatataatgctcataattgtgaaatgttataatacaacaggtgcagctataggtgcttatccattttaactcattccatcctcacaatacccctgtaaggcaggggcttttacattcttcagtttacagaaagggaaactaagatataagttcaagtaatttgctgagctaataagtggcagagccaagattcaaactcaggcagtctggtttcaaatgtgctacgtactttatcaaaacttctcttttggctctgttactccagtgttaaaagcaatttgtctcttatacacgctatgattcacctcgttatctttgccgtatctcttctggataagcaatacaaatggaaatttcatctgtttcgcaaatattttgagtcctggcactgtgatggtagctgggggacggagggatgctgctaggtccaggtcctgccctctcagaggttccaaagcaggacctgtgatggttaattgtatgtgtcaatgtgagtataccatgaagtgcccagattaaagatgatttctgggtgtgtctgtgagggtgtttctggatgagactaacattggaatccacgggttcagtaaagcagactgccctcgccagtgcagatgggcaatatccagtcagttcagggcctgaatacaaaacaaaggtgaaggaaggaggaattcctcccctttttctttttgcctgccggctgagctgggacatcgaacttctattgcccttggactgggatttacatcattggctccctggttctcaggctgtaggactctgtctagaattacaccagtagccttcctgggtctgtagcctgcagacggcagatcatgggatttctcagcccccaggattatgtgagccaattactcataataaatctctctctcagtgtatgtatgtatgtatgtatgtatgtgcatgtgtgtaggtatatatatgtgtgtgtgtgtataaatatatatatatatatatatatatattatgttctattgattctgtttgcctgaaaaatcctaatacactgccctatcttaagataaggaagacttaaaaatatggcttgttccccaaaactataacatccacacggggccaggcacagtgtctcacgcctataatcccagcactttgggaggctgaggtgggcggatcacttgaggtcaggagtttgagaccagcttggccaacacggtgaaaccctgtctctactaaaaatatagaaattggctgggcgtggtgttgcacgcctgtaattccagctactggggaggctgaggcacgagaattgcttgaacccaggaggcggaggttgcggtgagccgagatggtgccactgccccctatcgtgggcggcagagtgagactccgtcaaaaaaaaaaaaaaaatccagagcggggaaaaaacccgggtggtggaaccgacattaagaaagcttggtagggagcacgttatctcaaagttaaaaggtagcaggggatggtgagcatctgctagaaaattgaaattaggttgtgattacctacaccttttcactagtggtcaatactaatggagacaactgatgggacagtatattatgcagcctgttgtcaaaggatcagcctggccgtcagcactctttggggttttctatcattctttgaaaaggaaacacatgcactagcaactactacagaacccaatggggtgttctcatcgcatgaatttcttactatcttaaggctgtttcaagtcatttcaaaggaactcaaaagtaaattcagataaaactatgattcttgtgatagctctaatttcatgcagattattaacacatcaaagaaggcaaaggtcagtttaaggccctttctctcaaaaaccaacatctgttttcttttgagcagcgtctgcagcaatccagataaatgtaaataactataaaccaactataatgccctttataggatgctgtttaaaaatccatccttaatgctgcagagagacatttaaacaatctgagatccttagagaggaaaagaaaagtgaaccaacatctattcacctaaaaaaagagaaaagagaaatccttgcccaggaccattttaggcaacacaaccactccactgatcagcaggcaaaagcaaaccagactgccagcctcttagatttacatatcattttcaacccacgttgacttctaattacttcacatacaacacatgttcctcccagcatgcattgagtggttggaattgctattctttgaaaagaaattcaccagcatgaggatgcatcacagcagttgaaagttatttcaccataggatagggaaaaacaatcctagagtgagactaattgccttgtgcccagggaaagatagaggatgaatcaatacttcaggtcataggatgatgattaaggtacatgctgtagttgtcttgaccatttgttgcaccatggcggtgtgctgctttgcctgtgtttgccctccaaaatccactatccactcttcttgtcctgccctgtgccctcagataatggacccctatggactgcatcacctggttgggttaggtcaatgggagtcaccggcaggaaaatcgaggcaggatagagagagaggtcagtgtatctcttctctgctccctctctcctttgccattagagttctggcagtagccacgtccttccatgatcatagcacttgtagagcagcctctccatcctagtgccatctctcagggcctttgaaagaaggagttccttctctaactccttcaggccaaagggaggagctgcttcctgctgtcattactcaccaggtgcctcattctctcttatggggtcttttaaccccatctacacctccctaaggaatccaaagttccttcatttgaatcatctgatttgaattcagtttgttgccaggactcagatggatatagcctggaactgtgtaactgaagtacctggcatggagaccaggacaaagaaatctctcaataaatacttgttgaatgaatgtgttccagcttcccttgcagaaagtggcagaaaaatgcaagccagagtgacctgtaccctgtattccatagctgtctttccctatgaatgttaagcttatcaacatcccttcctcctgccaacctacacatgacacaattggcggtgtgtccacctttaatccccaaagcatgcatccccccaccctggcccaaccactcattcaacaagtatttatagagcttcggctgcatagaaagcattttaacaaggtgaggtccaggacattttgtcctgggattatttaggttgccctttgacataacatctatgcaactctatctgatggcaccttgaaagcatctatggaattttttttttttttttgagatggagtctcgctctgtcacccaggctggagtgcaatggtacgatgtccgctcactgtaacctctgcctcttaggttcaagcgattctcctgcctcagcttcccgagtagctgagaatacaggcacctggaccacgcctggctaatttttgtatttttagtagagataaggtttcaccatattggccaggctggtctcgaactcctgaccttgtggtctgcccgcctcagcctcccaaagtgctgggattacaggcgtgagccaccgcgtcaggccacatctgtggaatttcaaggagacactgagttcacctaggccaacattgagtcttggctctgtgggcagcaggccattagaactagattggtgtccaggaaaatgcaggttacactgatgtttacattaaaaggaaaatgattgtgaacaaaaaggaaaaaagacagggagagggaggggaaaggtgtaagtagttacgtctccatgctttttagtagttgccattaataatgtatttctcatatactccatttttatatagctgtctttggtcctctgcatggtttaaaggaaggtttcagagatcaatactcattcgagttgtaaaaattggttttctaccatatctatctttcctcctctctctctcctccacgcgcattctttaggcaatcttatttttggcacaactacctgaacatctgaaataggaatctccatcacaaccttgaagtgaaaccgtttgctcttgtataggtgaaagaaaatgagctctttaaaccaagacagaaaagctgcctttagagctccacatagagtctcctaactgaggcaataggatacgtggagaggaatgggattatctcctccggaaagcatggtttcaacctaatgcagaacacgcaccctcccccttcccctcagttctgcgcaactgctcacaactgtgctgtttaaaaacaaaaaaggagggcaggcctgggaggaggggtgaggcccagttatgcaaatgaggagccaattagcagagacaacaaaggggagatgcccgcctcagagtgccaggtggcagcaaggtgctaacaggaatcgggctgattaaaaccagcgctgtaggaagttttgaaaaatgttttcaacttctgccaaggcacggctaaaagaagcattagcatcgtgcaacatgaggtgactgcctgaacagcccacctgctgctcctcaggcatgggttcttacctctgttgttgaaagcaccgtgtcctcgtcaaggctgagcacggcgtctgtgatgatgttgtcgtagggcagaaaacggctgctcataacctgggaggaagtagaagtaggcagtggggagggaatgagggaaagaggtaacttcagagtcttgttttcaggacaattctcccatcctcacctgcataaagaatgcgctactatcatgtcacccctcaacaccgaaggaatctcatttcccatcaatgcagatgtatttgttcaacaattattgggcacctactgtgtagcagacatcttgcttgtcaaagagggtacaaagataaatcagacatgttccctgtctttgaagagttcatggtctgtagaggagaccaagaagcagatgaccagtctttgcttgatacaaaaaatgccaggagaccacaggatggagcaactagctgtctggaagagcaggtgaaggcctcatagaagtgacatttaagcaggaccctgatgggcagaaagaattcaccaggtatagatagtaatgaagtattaaagacaagacttggcagatgcagaggcactgagcagagaacctgcatcctgacacccactcttcccaaccgaaagagtgaatggatggagaagtgattccaagtgtggacacaaaccacggggagagcagatcactgtagaaagtgctgcttttacaaattacaaacatttacaaattaaaatatgtattagcacagattagaaaaaatatatacacatatattagcagctacagcaatcaaaggtaatattaaagttacaaataacttcattaaaatgagaagtatactgatttaaagaaatatattaggccaggcgtggtggctcatgactgtaatcccagcattttgggaggctgaggtgggtggatcacttgaggccaggagttcaagaccagcctgaccaacatggtgaaaccctgactctactaaaaatacaaaaattagccaggtgtggtggtgcatgcctgtggtcctagctacttgggaggctgaggcaggagaatcacttgaacccgggaggcagaggttacagtgagctgagatggtgccacagcactccagcctgggtgacagagtgagactctgtctcaaaaacaaaaaaagagaagaagaagaagaagaaagaagaaggaggagaaggaggagaaggaggaggaggagaagaaggagaaggagaaggagaaggagaagaagaagaaaaaatattaaataatagcacatatgatccatggatttagaaaaattgtgaaggtggtgtatgcataaagtttgggcagttctggaataaggaaaggtggactacgtgtgcacacacagtggtgtgtgtgtgtgtgtgtgtgtgtgtgtggtgggggctttggagattatggcatcagctggaaaaattgagggtggagaggttaccctgtgatagtcacaacttaaacctttgtgttgaatgtaccatagaggaactaaccataagaatgctgacaccataagaataacattttttgaacatttactgtgtgccaggatatgttgcaagtccttcatatatatcatcgtgtttcatctttataacaaccccattttacagggagggaaactgagatacacaggttaagtatcttgcccaaaacggacccaggattttcccccagatggtgtgactctatagagcaccttggccaccgggctgtatctgaatggaaaggacctcaaaagtgaatttaggaacacatatgccaatcatatgctcatcaccttcttccagaagttatagtaaggatgatgacatcctctctgaattcacacctgccatcaactttgaagagacaaaggccagggaaagaagcaacttaacactgcagacaaagggaaagaggaaaagggaggtacctagccagctgccagagctgcagtctccccaaatctgagtacccctaggagccagctcatctgcaggcctcatctcaaactcggtttctttgccggcgaagctaccagagcacctaggactttaatgcatggacagtggccactctaactcatctccaagagctcaagggacatagctgtagcacacatggcttcaggggttgctcctacacatctgtcaactgggtcaagttttttgttgttgttgttttctttctcaggcttttgaaataaaacacaaagtgatcagcaacctcatagacacagtgctcagaattctcagcctgaagcaatcctcctgatactgtttacatgtccactgactaacgcagaaaccattagctgccagcttagcactgccctgacctttcccttgttaagcccacaggggaaaactgcaaagacaacgcctataaattcaaaacagaatttttcagccaaagcagcaaatatattgcttctaaattcatggagatagagattttaaaatggagaatgaggaagatgtagggcttcttcctcatcatctgcccaaccacaggtcttaaaaggatctgtttcctttttttctgaacctgtttcatcaacagaagtaaaaagcccataagccatccattttcgaattctcatgcagaaatgagaggcttttttcaaacacattgcctcagcgaccttcttaaatggattagcatgagagaaaccaatgtatttacaaagttaaacctgagtgaactgggttttccttgttagttcatttaagaaaggtttagctaccatgtgaaagcccaactcctttaaaacgaacaaacatgttggccaggtacagtggctcccgcctgtaaccccagcactttgggaggcctaggcggtggatcacctgagtttgggagttcgagaccagcctgactaacatggagaaaccccctctctactaaaaacacaaaattagccaggcttggtggcgcatgcctgtagttccagctactgaggaggctgaggcaggagaatcgcttgaacccaggaggcggagattgcagtgagccgatatcatgccattgcactccagcctggacaggcaacaagagcgaaactctgcctcaaaaaaaaaaaaaaaattaacaaacatgcctaggaaatgaccaagactcaagaagtttactgtcttgtagtgtgtgtgtgtggggtggggagggaggtacataagaaatgtacacaaataattatataaaacacaataatagttaagatttattgagtatccacagtgcgcccacacttctcagtacatttatttatgtatctcatataatctgatctttttggctaccttattagttacatattatgactctttccatttattgaaagggggcatcgagacacagaggattagcaacttgctttaagtcacacaaaagtaattttgactttagagcccataatacaaatcataagattatgatgcctcccagaagaggagctaacatttattgaacccttggtgcatgtataatatgcataggactaagcacctgatatggaatggtcttatttaaccctcaaaatgggcccatgtcatagcccaggttttctagaatactgagcctgaagcaagacttaagtgcaaacgcttcactctgaggtgcaatcccagggcactgagagtcagggaaaagacataggaagaacccagcccactggattcagtgcccaaggtggaggcaaggactgaacaaatgccaggggcctgaatatagatgcagctgggaggatctgaggcatcttgtaagagacatctgataaagcccacgagaaaggtactattattatcaccaccattttataaagaaagaaacggggagtttcttttcactgagaatgaaaatataaaatcaatcagtgagtcagagcatgaaaatgctatactacctaaagaaatcagaatggctcccagacagactggattgtgtctgaatatcctgacatatccaaagaaagacattatccaccagaagcagagctggtctccttgacccatggaagcatacaaaacaaagaatcccaaagttcaacattaactgcctgcctctgagtactgttcatggcttcaggcattggaattggaacactgccattcctatgatgggctattctatgggggggatggatataagggcctgcatgaaactgtgcttatggtgagattgatttgtgagagaggcatgtgattattccaacatccaccttttctcattaaatgcttaccaagcagctctctaacaaacaggttgtttgactccagccttatgagagccatggctatatttgtcacattccccactgtgttccaagcctgttacaaggagctcagcacacagtaggcactcataaatggaactgaatagataatgcactgatcatcttgtccttgtgacagttacaattgcattatgtcaaaccatatgaaattgccacttttggtgagtcgatgatgatatcaaatggttcagcctaataaactgattttgtcattctggcgcaaaggtgtgagccactctcttatgacctgaccccttggggactgacaaggaaagttttttagatggcactgcttcaccaatctcaatttcatttagtagtgactatttccttcacaatgcgtaagatctataagtaacaagcagaagctagagaaaaaagagctagctgctctttagtagaagaaatttcaaggaggaggtagcatgcaaacgggggcttaaagaatatatgggaatgttgacaagcagagatgatgagttgaggggtggtcaagacttacaaatggcaaagtcaaaattagaggtaggaagagacacagcgcaattcagctaattataaatgatcaaatgtagtagggggcagggtctgtaggggaaagcaatgagagaaaagattggaaggctggctagggccaggttacacatggcctcaaatgttaattggaagcactagcaaatggagaaaaaggccgggagatgatcagaaagatagttcagctctaggcaaagtgaactggagaacagaagagaggccggctatgtagcactcatgagaatctttacaggcagatgccaaacaaaattaaggtgaaaatgtcctttttaaagtgaatgggagaaagaaacaccattctgatagacatagctcattcagattaatcagccaagcaaaccatcaccaccaccatcagctttatcttcatctttgtcatttacagaaagataactattgccagctcctgactttatttaatcctaacagcaaccctacaaggtatatattattgtttccactttgtagatgaggaaactgaggctcatagaggttaagtatacacacaaggtcacaaagctataaaagagttggtatcaagacccagatttccctgatttgaaagcctattgtggtcaaatctgagaatattctgagaaaagtacagttttagaaaaaataatccaggaacagggagaagatatctagggccaagacccaaagtgccccatggagaaaccaaggctccacagtggttccacatataggtccccttcgagtcttaccttgctctctccttcaatgacgacgacaggcacagcagtggcaggccagcggtgtttggctggtaggggcttgtcacaattccatagaactatgatctgaaagggatggggctcattagatggctggggtaggatgtatttatgtatgcctccaacccaaagcctcttctcagagacagaaagagaaagaggagctggaaatctcagcaagacaaaacggcagacatcaaaactgagttttaaagtgagtccattcccacacaacctcagaacattatcaccccaacaactggagagaggacagaaagagcaaacaaataaacaaacaaacaaacaaacaaaaccaactgtgtccgggaataggggaaagctgcaggaaaaagaattacggtggctggagcttaataaagtggtttcctaaattctgatatcttatgatggtgtgtgagataacaactctgatcaaattaaataaaaatgtatactgagcatctgaacatctgctctgaacttgcactacaccaggcaatgtgggagaaataaaaaaattcaagctagaactaagatgagctcatgttttgcatgctctagaatggttgctgattttatgtgactttataatttccaataaaggcatttagttcaaaaatgcatacttccttattgaattctttccttgtttgtaaaccttcttgtataaactaattcacaaatcagaaaaaccaccgttcaatatgggaggaacactgatttggaaaatattgttaccataggcataatcgtctgctcccaattttataattagtcatagttgctatgaaaagaaaagttgacacttcatgacaccaacaagtctgcttcttctattgaagcttagttgtctgggtcctcccagaggctttttggatgttactttatcattttgacatttaaaaacaaaatcatgtgcttgtatcttctttagagactatgttggtgtatgtatatatactttttaactctataccagtgctaaggtctctctgtaacccatcccttccctgtgcagatttcacttccaagaatttctaagtggatgaaaagggtgtaacgaggcaggatgaatgaaagggagtagcagggtatgatgttagagaagtcccggggagcctggggagcccgggggataacaggtaaggagggcggagtctctggtctggagctggagcaggcaggggcttctctgtcaacttcccgctcacctgggcacagtactgggacttggctgcagccacgagaagcttcaacactggctgggactgagagaccaggggggtcaccgcatggatgactgcagtgaatttggaggggggctttaaacctgaaataaaaaggagagtagagcctaatgaagcgctggaaagcaagacttagaaaattactcctccttgctccgctgcctcatgctggagcaaatgttccctcctggatgatttctcctttgcttcttatgtcctgacaggacagaaacaagatgaaaagctgctggttagctactgcctgagtctagagacctcaataaattccagatcaatgtccacttctaggttcttgctttgacatcctttgcccctcttggtgatgtttctgtgatgtccctttggctttttaggtacccagtgtccaaatacacacaacactcaccacccttcatgtgctgtctctcccatggtatttgcatgtgtctgatttttaattatgtaatgaaagggttctacctgactaatcgtatttcaaataactagctagtgggaaaaaaggtgaaaggaagagcatccagggcctgactgtctaggtctgaatcccagatctaccacttactggtcgggggaccttggaaagattacttaaccctctgtgtttccacagctgggaaacagacctgatagtaacagtgccaaatatggggttatcttgaaaattcagtaagtttgtctgggcacggtggctcacacgtgtgatcccagcaatttgggaggctgaggcgggcagatcacttgagaccagcagttcaagaccggcctggccaacatggtgaaattccgtcactactaaaaatacaaaaattagctgggcatggtggcatttgcctgtagtcccagttatcgggaggctgaagcaggagaattgcttgaactctgaagacagaggttgcagtgagccaagatggtgccgatggtgccactatactccagcctgggcaacatagcaagactccgtcttagaaaaaaaaaaaaaacttaatgcatacaaagcacttagaacaggacttaacaaatgacaagtactcaatatatgtcagcagctaccattatcatcaccctcaccaacattattattttggagaagaagcctccatattcccagaatctcttcttcgtgtagcagtgatatagctgagaaaaaaagtatgtgaggcagacttttgccagttgtgagctctgaagccctaggttaaaaaggatcatagatatgcaaaacaaccactgtcaccaaagagacagaagtgagatggcttccccccaaggagttttcccataagaactcactaagaaattagagacaggttaagagccttttaaaacttcattagtttagacccactaatttggcactttagtggcttaactgcgagcaacacagtgcagggacattcaagttacgctttgatactgatgggataaaggctagaatcagactatatgtgtattacaggattatacaaaggttttgtagagaaaattatatcatccagcagcactttaattgtatgttagaaagaagttaaccttcccaatatctagatacatattcaaagttttgccgagtaagaagaataagcgtgattgagggattgccttttaaacaggaacgacaagtcattgtctttaaattttcctgcaatagtttaagaagcatcatttatacacctctaatgtgctaactccaaaggaagatctaaatattgtacaagaaatatacagaaattcttgtcaaccagtgccttaatctgacaatttctaaattctgttacccaaatgtcaacaatatactgaattagagatggttcccataacaggtttggtttggattaaaaggtgctttgtcactggttgatgcttcaggccatgcatttctttaggtttcatctcatcagtttcaaactaaacatgtacaacttaaaagggtgagggtgttacggagaacaacggcactgaatggaaaatcttgtctttttgctgtatcagcttggaagatgctttcctgtcctaggctttctcaagtttagaactgtaactgatgggaaatgttcatgatgtttctaacatgagagcaactgggggtccaaatacataaatgtctaaggcaataacagtagccggtggtagagatttatccctccgccattcccttttccctactgtgattagactgaaaaccgcttgaaagcagagattgtatcttatttgactttttatttctagtacccagcaatacattagcatagcacatagaaggagcataataaaccttggaaaaatgaataaatttgtgcttgtcacacattcttagttatttctcctttcctcttattcagtttttctttggtaaggaatagagatattgggattgtgaaaaaaaaaattggggagagctctccattttatatatgatgaggcttaaaatgatagctaacccattgccatgttcaaaatgatccataatttggggagcctatttctcaaaaagaaataactctactaaatatgaagtagagctgcacagataagaagtttttctttttttccattttgcaatgctctgctctgtttttgaacttgatatgtcacttataacaaggctctagaaaaagcaatcttcaatgcagggtgttagatggaccccattagagtagaagaataaaggcctttagttctgtatgacatcttcagggtaaacaagggcaactccctggaggaaattcacttacctaaattagcatagtagtaaggaaaatctcccagataagatgaatactgtggtagtacgaacaatcctccaggatgtttgttccatattaaactgttacgtgatatgtgcttgaatattctgtcctgaataatctagaaaataaaacatagcacacagtgaggatgagatcctgatgatatttggaaaggatgatgctcaatccaaattcgaaagatggtggcagtcagagtagtgactctaccctccctcccactttaattctccggataaaaatgtctgcaagacagagagagtaatggagcaatgaaaaagagtgagagaaacatatgaattatagccaatcaaatttcctaattaaacttcagttaaaccataagttctatcttgtctttgtataataatgagtccatgctcattccaaaatagactgtgtggagcagttagtctttccctgatggttaaacttctaagaactaagataggttccaggcccctatcaagaagatctgttctcagagaacaagagaggtcaatgtagacctgtagatgctaaacggaaagcatattcaagacatgacacattctagaagctattgaggttttcagctgttcctttaattcaagaggtagatgtgtatacttgtcatatttcattttcctttcaaagtcaattggaggactttgggtgctggttactgaagtttttctatatttcatcttgaaaagtagtgagttaacaattgcttaaaacatcctacataataggacaagaaccatggcatatgaagactaataatagccaagctagttcattagtttctttggactttgggaccttgcagatcattaaattctacatttagagtcaaacatcctcccatcccgaatcatttgtcagttgaatgtgattagtccactttatagctttctctctgtgactttcaaactcttacaattataccatccactcattagaatatgatttggcaaataattaacttggtacagaattttatgttttcagcaattttttttacattaaaaaaaaaaaagaaaaaaatcctgccgtaagttttaagacatttaagacccaaatcaccattttccaggtctccatttaatgcaatgtgattttaagtacagactattttaaatggagttttattatttgctaaggttattaacaccctcatctcattccacatggtgactagataagtaataaagtgggctacatttatctttgcaaatcttatgtttattttcctaatgacagagaaggaagcaaggaggaaattcaaaagaactcaaatatcttagttcaatgatttctgcatcttatctttcacccagatcaaaactgctaattttatatggctggatagaggtttctaatttggtggagactttaggaacctagtgaaaatatttatttttactttttgtggtacaacagggatatgttaaaatgctgttgtcttggcattaattatgagaaaattgtcatagttgtgaaggactttttacatggttagcaatttcactttgtacaacatttattcctgctttttattatttgtactttccaaacgtactgtctatttatttcctttttatagtttctctttagatcctcctttttttgtttttttcttttcaaatttatgtaccttttaggatgtggtcacttaaataagtttggatatcaagatagaaaataaattgacaatagacagcattataaatcgaacctacagacaaatatcatggaactcacagctgtcacaaaatgggtcatcattcccatcaggtctttggatggtatgcttgtcattgtcatagactatctttttggttcggcatcacaacattgttatcttttaaaattcaaagatatgataataagatatagcactcttctgaaataacaacaagcattttatactgtcttccaacggatcttgacagaaagacataggacaggtacgaaagcagtagcaaatgttgaatttaacgtgggtcaagcaatttgccacctttgtgtattattttcctcatttgtaataaaacaataaaataccacattaattataacaacgtctcagaatttaagaatagctgcctaagttgttatacttaaggcttgatttttgcctttaaaaagaaactcactcctgtgttcgttttctaggcattggtttttccatttattacatagtggtaatagtatagatattacataatacagctatttttacatattaatagtattcatgattcattattcttaatgaccagtttagcaattttttccatgcaaagcaatgaacatatttacgaataaaattttccacatttaggattgattattcttcttcttctttttctttttttgtttttgtttttgtttttgtttttgagacagggtctcattcagttacgcaggctggagtgcagtggtgtggtcatggctctgtgcagcctcaaactcctgggctcaaaggatactcccgcctcagcctcctgagtagctgggaccacaggagagggtcaccacacccagctaattttttatttttattttttgtagagataaggtctcattatgttgctcaggctggactcaaactcctgagctcaagcaatcctttctccccggcctcccaaagtgttgggactacaggtgtgagccaccgctccagaccagaattgattctgtaggaccttgtcaaagggtataaatacttttaaggctattcattagtattgccaagtgtctttctaaaaggtttatatcaacttgccttctaaaagcataaagaaatatggaattcatttcaccatatagaaagatcatttttttccctctgcaattcttcctatcactaccctggatagctcccagaatcttttcatggcacttagtgcttagtctttattgtggtggaagaagacatcacattagaggttggatgcttctttggctataaacaaaatcaatacacacacacacatacacaaacagataatacaagactttttttgttatggtcctagatggccccctcgataaggacaatatttctaattgatgtgaattcaaagggaagaatgacaggctccttattttacttttatgtatcctctgttttccaaataatggacaattggttataggttaaagtcattctatgtagcccttcatcttttaaccagagcactgtagcctaagatacacgatgccaccatatgccacctcacttgaagccagatcaattgtctatttccattaccccattgatttttaaatatcattgtatgatagcatcagcaatactatggttcgtatgtgcatgattagataactgaggaggaaaatgaagcatacttcattaaaactccactaactatataccttcctagctaccactggctcttttcacatattatcataatctcaggcactttctttcactcatcttgattatgactaagctccaatgattcaatccttagtgcaggttattgtgcaatattctgacaaataatggaatccatgaaggagcactgtttttgcagtgttttttcattgtcctcattgttagttctcaattttcacaaaagtactgagctctacagagcctagtttgattaaatagctccttattaccaagatgcagcattagagaatttcaatcaaactggaaaaactaaaagaatcctagacagagttctgtacaatgaaacgtactaacaacctgaccctggcattgaagagaaaatgagatgtcctgttttcaactgagtctaagcactctacctacaactctagggctcataattgctgaagaccccataatcccattcccatggcttagaatataccaagcaaggagaaagacctagagtctgagtacagaacatccttagcccaggatcttcaactctatgctgtaactgtgagtaactatgaattattctcgtgccttagtagctccagcagtgactaaatgaagtatattatctaagttctaagccaagttcacatctttgatacgtgatacttaaattgttcttataaacacatttgctgtgttatttgtatctgtggatggcattttcttctatttcccctgattttttgattatgttgaattctggggtaatctgagttatgaagtattttgggaaactgggtagtacctgtcatgcaacttggttgagaggtcaaactgttacaatccaatcttggaactatataaagagatttgacagttgctataaattcgaatgaagtgtatggtttttagtgtttaaaaaaaccccaaaactgtgttgctaaaaaaaaataataataatacatggtttaaatacaaagggaaaaggccttttcaggttcagagatgaaaacagcttgatcttattttgatcctattctgatgaatgtaagacattcaactgttacaatagaaaaattgagaactgctaacttaataggtgagagaccatattcatgcaataaaccatatgcaaaagacatgtaattaatgagataccatctttcatctggcaaatcagcaaagtgatagatgtgtgtgttttaattatggatctgtaagactgacaagagcacagcaaaagagagtcacgcccagacagcttgtgagattctaggtggatataatgtttttggataataatttggcaaaatatattataagccttagaaatgcctaggctctttggctcattaaaatcacttcagggattccatcctaaagaaatagagatgtagtttaagatacatgtagaaagtcattgcttagataaagatatagttatctataaaaaataaaaagaacattaatagtaaataatggcatattggtttaagtaaatagaagttcacaataggatgcataatagagtaaaaaaaattaaaacactggaatgtgctctggatgtattagaggtaaacaactaataggatagaattgaaaggccagaaacaacccaaagatacataaaaacgtcatgagaaaacactgaagaaagaaatgtattggggctgggcatggtggctcatgcctgtaatcccagcactttgggaggccgaggcaggcagatcacttgaggtcaggggttggagagcagcctggccaacatggtgaaaccccatctccatggcgcatgcttgtaatcctagctacttgggaggctgaggcctcagaaatgcttgaacctgggaggtggaggttgcatgagctgagatggtgccactgtactccagcctgggggacagggtgagactctgtctcaaaaaaaaaaaaaaaaaaaaaaaaaaaaaaatcttaacatttggcatattatttgaaacggacttcaaattcaaggaatttatcctaaggaagtaatattgaatctgcacaataatttgaccttgagatgatttactgcaatgatgtacataaaggaaaaaagccagaaacaactggaatctacccaaattggggattaatttaataattagatgatatcataaatggaatatcatatagtcattaaatggagaaaaaatgtaataacatgagaaaatattaacattattaagcagaaaaacaggttacaatgcaagtatataaagactcctttttaaaattaaaagtacaacaaattttaaatttacatataaaaatgaatatatatgtttgtggggatatatatatcaatagtggttttacatgaatgaattattttatattttatgctttaagtgttttctattagtttctaaaatgaatgtatacttctttaataataactcctttaatcccaccaatttgggtagtcgaggcaggaggactgcctgagccaggagttcaagaccactctgggcaacataacgagaccttgtctccacaaaaaatgaaaaattagccaggcacagtagctcgcgcccatggtcccagctactcagaagactgaggtgggaggattgcttaaggtcattccagcctggtgacagagtgagatcctgtctaaaaaaaaaaaagaaaggcactctgcactccaaaaagggagaaacaataacattcaacattctttaagaagggcctaggaaggatcttagatggaggacaggattaaaaaagcaaagggtaactctattagctactgtgaacagaggtaacaactcaattgattttaattgaggagattgcttttggagggataaaagtttgcttgcaggaaggaagcccttggaagtcattatgatcctgtccccttcatgggaatgggcctgggtcttaaacagccccttttacccagttccaggatgaaaaaaatacacactatgcctaagagaacactgaccagagctcgccctagggtgggagcaggagcccaagctcagcatggggtggataaatgccctggtgtgcctggagcatgaccagcactggctctgatagtcaggatggcaagaaaacagcgatgtggaccaagtagggtgacttcagtttcttggtattactcagatttctcagtgtaggttccatattacattagcttttagagcagtcatcactcttccagagtgaattctccaaaaggaaggccacaatgcccccacctcattttgggacacctcagaatcacctcaacgaagatctctgctctcctttcttcaagcttgtaatgcatgcgtgtgcagtttcctgaatcttttcctagctctttgtgctacttcggtgtagcctcaggccaatgctatctgctctatttccaaaggttttaatcatctccatgcttcctttttctttttccgtcctgccttaaaaaaaaagcaacttgaggacgggcgcccatctgcctaaaagattttctgctttcacaaatttaacactttctgtgccacatgggtatgatcctgattctcctcttaacacaactttgccacattgacgctggttggctggcttgcctaagtcttgagaattctgctgtcccgcaatgccattggactgtggtgcccagaaaactactcatatttttggaatggtagaggatttgcccttacttggccattatatatatttttctttttttttttttttttttttgaggtggagttttgctcttgttgcccaggctggagtataatggtgcaatctcagctgactgcaacctccacctcccaggttcaagatattctcctgcctcagcctcccgagtagctgggattacaagcgtgtgccaccatgcctggctaattttttgtatttttagtagagacgaggtttcaccatgttggccaggtcttgaactcctgaactcaggtgatgcacctgcctcagcttctcaaagtgctgagattacaggagtgagccgctgtgccaagccattaaatatttttttctaaatgaactccagaaatatgtcttcgaaggatgccattgagtgtaaatgacaagacagtcatgacccacatatccctgaaatgatgtaagacagagtcaatctctgtgtcaataagtataatttctccccatgtaggttttcctttgtggagtttgtcaggaatgagagtattttcttggccatggcaaagcaggtaaaagaggttaaccaatatatccaagtacaggaatctggttttgccccactggaccaatcacacatccctaatagcaaaacagaaggctgagagaagtgtataaaggaccattattcaagcccaagagccaagtggtctcacttacctctagtgtagttaatacaatcttctcaactgaagaaaaataagcctcccacaagaattgtgtctgctgtctaagtgctaggattttatcctgatgaatagacctgattgtagaaggaatctgtaacacaaggtgaacacataggaattataactgtaaaacaaagagatgcacttgatcaaaataacccaactgggttaggcttttattcttcatagcatttggcttctagcatatagatctactaaaaatcatcaattcctaagttgaaatgaccttaagaagtgtcagctgcaaagagcacttactgggaatccaccccaatggcctttgatgtatgaaagttacagttcacctctaagattcagtagcaccttatcagttgcttaggttagtctatagtcacaattgctgtttccagaaatccttgaccttgcacatgaacaaccaaattttatagaggggtaactataggtcttggggaaaggccagaagactttatctcccaagcacttctatgattggtcaccccaggaactataaaatatctataaaaggactttttagagaatgtctatgagccttcccatccaatctgaagctagggtcagtcacttttatgtgcacataccttctacctcacctttgagcctttctgctccctatatctctctttctgccttcagcctttacccaagtctaactggatctctcaattgttcatatatgattagccatcactgctctcttccagggtatacaattttaaaggaaggacctatatcttgttatcctgctacacattttcaggttagcagagtggattttatatagtagttattaagaaataggaggtgaatataaccatctgaagccaccacagggacgtcattatttttaatggtagtataactgaatggtcaggcacaggggcacagaagtcagaaagatcaaggaaggagtgttgcctctagcagcatttactacctgtgctttcttgaatgagttagctgatttctcaaagactccacttctttacttataaagtggggataaagtactaaggttttaatgatgattatataagtgcttagcacagtgcctaaaacatggaaaacttaattaatgtaacatcactactattatcattattggtatcagggtgatgctattaaaagctggatcaattgcttaatgtttgcaagggaacctacttgggtctggagctctgaaatgtacttcctgagtctggtaagttttctgggcttgttccctattttcacctacagttcaaggtctatttcatttacggagtctatagtctttagggaagattccttgtgatttgcaattgcccttttgtgctcacctctttctgcatgcttgcctccataacatatgactaatccgacagatatgggagtctgagcaagaaggagaaatgctccgttagctgctttaataggaaagtcacccatggcatttgactaagactgtaacagagtttccattggaggggaaggaagtggtagcacattttttaattcagcactccccttaggaggagcaataaaatagcttcacagtaagaacagaaggaaaagctcacttggtttgacaatgtccaaaaccagatactaaatctgtgtcccaaagtgtatacctggatttgcaacactgaaaaaacagaggcaacatgtaaaggagaaatactggcaggcaaacattagcctgtaatcagagcccaaggtcaaatggaaataaaacattctttgagaaggtagacaaatcatttatatcatagaacctttatcagtgcaaggaaacttatttttagttactcactgagaaagttacctagatggccaaagaaagattagaaaaaaactatcctgttcaattttcataatcataccctcttctaaatgtcaagaggtaactgctaagagttatataggttggcatcactgttttatcgtagccacaaggaaacagtctattagaaaaatgcctaaggccgggcgcggtggctcagcctgtaatcccagcactttgggaggccgaggcaggcggatcacgagttcaggagttcaagaccggcctggccaatatggtgaaaccccatctctactaaaaatacaaaaattagctgggcatggtggtgtgcacctataggcccagctactcggaaggctgaggcagaagaattgcttgaactgggaggcagaagttgcagtgagctgagattgcaccgctgcactccagcctgggtgacagagcaagactgtcttaaaaaaaaaaaagaaaagaaaagaaaagaaaaatgcctaaagctgtcattgctatatagtctccagaaaattgagtctgctgtggttatgaaaggagaaaaggaatatcacagactcacctaccaatgctgttcccctctcttaaataacatgcatcttcatcttactacatcaagtgcaatgtattctaccggcttgtgatatgatacaagtgtctgacagcactctgcaaagtgctctggaagacaactccaattgattgaaaagacagagttccaagttttaatggcacttggctattggttattaatctgcttgtcctgagagacaggtatgggaaagtgataaattaattccaatttggctggattgttttggaagttgccgagctcaatgaagtcttaataaaaggtcatgtatggtagcaaaacaaatggaatgcaccagaatagatacaagaaagtcacattaagctctcttggtgacatgatgacaagaatatatgcaaataaaaacatcccagctgttctaaaacaggaaataaaaaattgtaacataacaaaaaaacatttcccagagcagacatttgggctgggtgccaactctttaaaaccattgttaatgatagtacacagttgctgctcaatatggaggcagctgtgcaaagacagactgaatatgagaggggaaaaacaccagcaagtctgggtgggtgggggtgacaaaaatcaaaatctttagagtcaagccaaaaagttgcttcagaaggtgaaatgcccatcaagtttggtgaaatggtagaaactggacaagtggctgggcgcgctggctcacgcctgtaatcccagcactttgggaggctgaggcaggtggatcacgaggtcaggagttcaagaccagcctggccaacatggtgaaacaccatctctactaaaaatacaaaaattagctgagtgtggtggcaggcacttgtaatcccagctactcgggaggctgaggcagaagaatcgcttaaacccgggaggtggaggttgcagtgagctgagatcatgccatggcactccagcttgagtgacagagcgagactccatctcaaaaaaaaaaaagaaagaaactgcacaaccacaattaagtatcctaaaatgcgctccataccaaagacaaactttcaatttgttcacatcaaattcatgggagcattggtatataaaaggaaaattatgggtggtgttttttattccctttatttctcaaatttcttttaatgatcatgtattatttttaaaataacatttgaaaaaggaagaaaaaaggctacatggacaagcacaacatgcatcactcttgtttggcttttcatgaataaatgattttagcatacactatctctgcatggggaaaactcttcctcagtgtttctgcaaggacttcttttccttaaggaatcacagtgggaaatcattggcataaaagtggccctttcacaaaaactccagacccctttctcaatgaacacctaagaaattaagttgtattcagggcagaataacttattcccccaaaaacagattctgtcacattcctcctttgtttctgagataatagggactatggagatcacaaactgagtgccagacagaagtaatgtttcaggagctgtggtcactttagtttgcttaacccatgggtctctcagttacagttagttcatttgttattttagggaaagtgctgtattacttcagcagtcagctagcagactgggcagcagcacagaaggagaatcaacaacagacttaagaggccaggcgcggtggctcacacctgtaattccagcactttgggaggctgagatgggtgaatcacctgaggttagaagttcgagaacagcatgaccaacatggtgaaatcccatctctactacaaatacaaaaattagccaggcgtggtggtgtgcacctgtattcccagctcctcgggaggctgaggcaggagaatcgcttgaacctgggaggcagaggttgcagtgagcagagatcacaccactgcactccagcctgggcgacagagtgagactccatctcaaaaaacacaaacacacacacatacacacacacagacttagaaactcaatttaatgaatatccaaaaactaaaagggcaaagacattaaaaaaaattctacaaatatttgtggtaattcaaagataaagtgtatggtacaacaaaagaaaaacattaaagttctagaattttaggagaaaagagcacggcaacttgtgttgatcctaaaatatgaatatacaaagggctttagaaatccttagtaatttaaaaaaaaataatacatgatcattcctgccctcagatttttctgagtatcgtatccccctccctaggcagctcttgagcaattcaaacttttattaggggctgctcatttaaatataaatcctaaagataacactcgctcagacacccagactggatcatttgaggaacgataacactaattacaagaacaagccctagagacctctctctttctgaaaattaatctgaaggcaagtgcagaaacagaggaaaagaatatgaaacagtagggtagaataaaaactctctggtaatatttctaaaaattctggttattgaaaggggtggagatccacttcttcttgaaaatcaaagctcccattctttacctgcaacttcttttcagaatatattctggggacctggggagattttgttggaaagtgaacaatgtcatattaaatgacttcatattcaccatgacacaggtaattttctcctgataagatttcttttatagagctgaccttttggattcatcttctttgaaagtttggacgggggcagcaataatctgctgatgtgttgaaggccacagccccttccttacctgtaataacaatctctcatcgcctatgacggcagcttggttccaattaatcacttcagagaatggcaactcccatccattgctgagcatcacagggacgcaggcagcctgagcaaaaaaggggacttcgtgaatgtgaggaaagcgacagcagaagctgttccaatcagaggtgaaatcagtacaaactcaatgactggcatttttgacactgcatgaatcctggactgcctaggccagaaggaaaggaagcttttatgagttatcaagtcacacgaaggttgtacgtatccagactagattttaatatttgcaagtcttgccctagaatgctaaaaccccatttctattctagtacatggtttggctgaccttacttccatagagacgactggccttgctggagaagtttttattgacgtaacaaaagctcgcaccaacaaaatctgagtatagaaccaaccttgaatataaacagtctggtcaacgtaactcccacaagtccacgtgcaaagtggtttaccccaatgtcatgagcaacaaagagcagaatgaagctcagcattcctaggcagcagttcgtggacttaaccagtatagagtgttcacatttcccttgctctgcaaacacccaaaccagaactttgttcctttcagtgtggagtgatctaaaccacagtcataccaatttatggtctgtgccgggaaataaacagccaagaaacactaggttaatgacaaaatactgattccaaataactcataatccaaatcagagaacaatttttctttatgcagcatcccaggaggctacaagaacattagtgatggcatgctatgcagaacacacacagagagcaacttggaaaagacattccagagaaggaagctcttctgttggagggcatgacagaatgatttgcagttaagatggcagagataagaagttatgaggcactgcagcaaaagcacagatttaggcatggtgcagggcaagaggaggaaagaacatagtagcaaagggtcaaggaatggaggatgagagaggttgagggcatgctttctctctgcaatcaaagaaggctggttgcaacttccaggtgggaaatgtggatgactgtctcaagaggacatttctgcagagtgaggttgatgagctgagaaactcccaccacaaaggctccagggctggagccaggacctctgaactgcagagccttggaagagctggatcatctgagtagtaccaccatgctggggatcattctcaaaattgaaaggaactgagagacaatgaagatgcaggcagaaaagacaattttgcttttagagagtaccacgaataaagggaaagtgtagggctgctttttagagtccagctaggctgcctggtaggccaagctggcaattagatttgccttctgtttctaaacatgacccagaagaatccaccatttaatttcttacatctaaaattactgagtaaatcctccctccacccctcacttgtcaaaaatgttttagattttcttgaaaatattttcagatcctcaagggaaaccacaccttctctttagctatcccaggagaggtgataatgttaaacccacttaatctggcttcggtcctcagccctattctgggaaggctccagggcctcttacctgcaaagcctccaggaatctgaaggacccaagcctgcgaccacgaggaaccagacagaaagtggcattgtgcagcatttcccgataatcatacctagaaagagaagaggagtaaacagcaaatgaagactcattgcgaatgtggggatattgaccataggtgggcgcccatgtgcatgaatttacgcaaagcaactcgggaaagccaccagcaggcagctctcacttttccattttgaggaaggaggttgggttgctgcatgaagagtaaacatgaatcatcatgttggacaaagcaattaggatcccttttgcaagcagtatatataaagacaagtctgatcgttctggcaacaatttggtttgcccagtctttgcttccaaaatcagatttttaagtcttgataaaatatgttgccccatagtcttaaaaagaagaagagaaaattactggtgcttctccttctcctttaacaatacggcattcagcaaaactaagactgttcttgttccccaccccttcaaaaccatgctattaaaaactattcagaaaacctcaatcacaggcacaaaacaacatttgtcttctctttcaagatggagtttctacacttaaccaagaacgttcagttacccaggaaaaatattcctgtttaagaatggctgacataactcacaggagaaagaggaggtgagagagaaggatgctagcctaagaaagggaaagaaagaataacgagaaaagaaaagaaaaaaaaaaaacctgaactaggagggggtacaggaaactggtctacagaagagatgaatttattttactcaaataccatttaatgatattacattgcttttgcttttcgaaaaaacatacaaaatatgagtgttacctgtttctttatgccagtgaagtttaagaaagataaaaagcatttcattttgtttaggactgtcacttttaaagtgattaccacaaacacattcctacacaggcagtttcaagtacattatgagtttaagaaaacttgggaaagtagagatggctcatgtcctgtaaaggccccgattcttagagccaagatgaaatcactctcatttttcaagagcttccaatgctgagcagacaggtgtgactttgacagtagcatatgtcaccaccactttctgactctaatagtctaatttaatcatagcctaaaggcactgaattcttccctcttctttttgggtatattggtatatacatttatatttttaaagtccacatctatttttatattctcatacaaactaggcatacgggagtaagccaattttcaattataaacccgccattaagaagagacatcatgcaaaggaccatttgcttaaacaagcgtgtacaactaatttgcacaagaaaaggtcaccgtgaatggattaagattatctccattgagagtaaaaattttctaaaacccttgctgcattaattaaattgcaaaatagacttcaaagtaaaaaagatttttaagaaggcttgaatttagttaaatataaaaaaaaaataaattagatggtagtgatttcttcatcctcaccaaacacaggaaaatggttgacaaatatcttcaagttcaaatgttgataatgttttaatctctgcctaatagatggagcagagagaaatatgcacacacacacacactcacaaaaatatatgcataaagtttaagctgatttttttttaatacagaaaggtcgaatatacttcagactacagcaaggtttaataagtacccagaatagaaacccctgagggactagcacagaaggtcccacattctcatcattagcctactaaaaatgtaaaatcctattaatgttctgcattgtaacaagtttcaaagttcctagttgcagaatttactttagggaatgtgtggaggaagaggaagggcagaaaacttataggaaaaattcaaatgacagttatagtgggttgcttaaatggttacatagaaggactatttgctgatatagcaagtaagattgacatgatcgaagcttgtattccttcacataataggtaataggagctgtgggaagaatacccttgcaggagttaggaaaccactaggtagctgtgagacttaaaaaacccatgaattttctatctgtttcctcatctgcaaaatgaactacttgggctagatgactatagattcagttttaatacttgattactctttatcttatcatttttgggtaagaaagaggaatgtcctttgagaatatcccactgcttaggtgtccataccattatatgtatgtgtatatgtgcacaattccatacccatatatgtgtgtatatgtatatacatacgtatctgttcatatgtatgcagtgcatgtctaacatatgtgtgtattcacatagaggctcatacagaacatgtacactcataccttagaacaatgattttcattcagatttctatgcatgctcagcctgtgaaccagcctctctattctactctctggacagtcaatctatgaattactaacatgttctacctgaaggaagaatgatgccccacaagtgggcagacaactattctagtttgaccacgtgcttgatcctctcctactcagcccattgtgatgctctttcacactgcacatcaacctccttgtagatgcttaaatccactcatttattcattcattctttcaagaaatactatgtttcagacactgtcccatttcaacagatagagtccagagaaggtcttctctagttgctggagctaccaaagaagcacctgacaatgagaaaatgctgatgagatgagaatttaagatataaacatctcctgggagtatttgcattataagaggagattatagaaggccgacctttcagaagatacacaaagaagtctgtggccactctccccagcaaaacagcaatttagtaacaatcataaaaacattttaagtctctgagaattgtcctaaggggataatgacaaatagagaaacagtcacccaagaaaatctaccaaatcttggcaagaaccatgagagtctgtggcatctggtccctgacctgttccatgaccaacccctactagctctgccttacaggagctttactctggggcagtgcagtcaggaaggctgggctctccatccccccaggtcccatcaagaaagtgaaaaagagcctacagaaagagagaaccaccgggcatggtggttcacacctgtaatcccagcactttgggaggcccaggcaggcagatcacctgatgtcaggagattgaaaccagtctggccaacatggtgtaacctcaactctactaaaaatacaaaattagctgggcatggtagcacatgcctgtaatctcagctacttgggaggctgaggaagaagaatcacttgaaactgggaggtggaggttgcagtgagccaagatagtgccattgtactccagcctgggcaacaagagcgaaactctatctcaaaaagaaaaaaaaaaaaaagaaagagagaacgtatttgccaatcatatatgataagggactttcatctagaatacataaagaactcttctgactcaacaataaaaagataaataatcaaactttaaaagaggctaaggatttgaataaacatttttccaaagaagacacacaaagtgctgctaaacacatgaaaatatattcaacatcaatagtcactagggaaaagcaaatcataactacaatgaatgagataccactttacacccactgggatggctataagcaaaatgacagatgagagcaagtgctgatgaggatgtaaagagattagaacccttcatacatttctagcaggaaggtaaaacggtgcagccacttcgaaaaatagtttggcagttccttttcaaactaaaaatggacttaccatatgacccagtaattgcactcttgggcatgtatcccagagaaatggaaacttattttcacgcagaaacttgtccacaaatgttcacagcagtttgtctgtaataaccttaaactggaaactacccaaatgtccttcaatgtgtgaatgattcaacaaattgtggtacatccatagcctacaatccttctcagcaataaagtgggacaaactattgatacacacgacaacttcaaggaaattatgctgcattaaaaagtcaccctcgaaagtgtacatactgttgaatcctttctatatgacattcatgaaatcacatagttacagggataaagaacacttagaggttgccattggttggggggaggaggaaagacagggagacttgagaggtcaaatggggggacacagtgttttaagatggactaattctccctcgtttcttatgtttagaaatgtgaatcacataatcacacactacttaaaagaaacatatgatatcctaagcaagaaggtaagtaggtgagggagacaactaaccccagataatttgccactctaataaatggttttgctacccttttcagatgggcattaagttccccacgtgtaggtaaagaaggacaaaaggtagaagaattttcacaaacgactacaaagaaaaatgcaataaaaatgacatgaccttgaatttaacctagacactagtaccactctatggccataatcattttatacttaaagttgtattgaacaatgtatgggatgcaccccatttaaaatggactatgcaataatgcacaattgaagtcctgcccctctgtaggaaacacatttttgctggcagccattctgtgcaactgggaaagatgggggagtgtagcatagagcaggggttctcaaagtgtgttcttccaatcagtggcaacatctgcatcatctgggaacttggtagaaatgcaaattctcagcctcacccaaacctgctgaatcagaaactctgggggaagagcccagaattctgtgttttaacaagccctctggataattatgatgcaccctaaattttcagaaccactggcaccatagttaagagcttagtaattaaaagcttagtggttaggcagcttcagacacagcaaaacctgggttcgaattccagcttttcaatttataaactgagtaatcttgagaaagttatttaatttgtttaatcctagtttcttggttggcaaaatggggataatacttatactgtgaggattaagtgatacattttaaccaaagcacgagcatattataagcaaaccataaaaggtagctattatcattatgactgaaggaagataacagaacataatggaaaacacagccagcttcaagttagaaaatctgggctaaggaatttgggttcttgatctaccacttcctgtgtaaccccagcaaatcattcaacttctccaaacctcaaagttttgaagatcaaatgaaatcatgtacattgaatataaatggcaaagcactatgcaattgcaagttattatggtaaattatatcagaataagagggatataaacatttttaaaacccctagtaacaattaaaaagaatgaaaactacaccagtatcccaaagacagagccaagagacaaatgtggaacagaccctttaaagtaaaatggaaacagaagctgtgaatcacaacagaacagcagcttctaattgaaggcttttgccttattatcaaaagctacatagacaaggatgttgctggtgcactgtgctcacaggtcctcctgtggctcccacaatccctctgtagcacgcatatttgccaagtgaacctgctttttgctaaccaaagacgatagggaagaaacaagtgatccagcctctcatctctgtactcacacaattctagcctccccatgatgttgtcacagtttgtctcaagtatttattcataaagtaacttaacatctacagctgatctactccctccagtccccatcctcataagtaattaatctttccttatacacaagtttgaataatatcccttaagaaaaaaagaaagaaagaaaataaaaataatttatgactgttgtagttctctaaagtgcatggggatgagagaaatgaaattaacatcctttgagcacctccttgcgcctttttcattcattcaccaagcattagttgaatgtctaccatgtgtcaggcactcttcagggagctcactgtccagaataaacaacatgtgttatcaaatgatgattagtcagcgagaggagtgctaggattggacatgaggtagaggtgggtgttatacagagaagagaagcaatggccacatgtaggcagggaggcctcctggaggaagtgagaccctgagctaaatcttaaaggatgtacaagaagcaaccaggcacaggggtaagaggaggtgatgggaattcctgggggtagagatagcatagcaggaacaaaggcaccaaggtgagagaaaccacccagtttggggaggggaaggtatgggggtgtgggctgctgttactggtgggttgccactaggaaggctttctatgacatctcctagagctcagagatgatcccttgcaggtgactggggtgtcactgaagggcttgagcagaagaatgacatggtaccaatggtgttctcaggacttcatataacccaatttcatagagaagcaattaagtttggagacctcaaaaacccttccaatgcaggtcacagctaggaccaaccagcctgtgttccaactcctggatttctcattctaaatcccattttctttccattacatcacattgcctccttggtcagcccatacaacatgcagtgtctaaaactgacatgtcttatgaagccaggtcctaagcagttcacctagtttcaagcatgggctattcgttgccaatttaaaagggctgtttctctcccattcaaaacttcaccccagatcactaccaggagctcagtttaagaaggtactctgtcatctatttactaaccatgttgccttagacccttccttggcctttaaaggtttaacagtttaaaatttcaattactattattattattattattattattattattttgagacaagatcttgctctgtcacccaggctgcagtgcagtggtgagatcacagttcactgcagccccgacctcctgggctcaggcaatcctcctgtctcagcctcctgagtaggtgggactacaggcatgtaccaccatgtcaagctaatttttaaactttttgtagagatggggtctcactttgttgcccaggctggtcttgaactcctgggctcaagtgatcctcctacctcagcctctcaaagtggtgggattacaggagtgagccaccatacctggcctaaaatttcagttatttttgagaaaactgaagtttacagcatgcagtcgtacggaattgcccaaggcaaagatttgaactgagaaacatatataagtgggaaccaatcttttagctggaaaatgggtccaactggccactgttccatctcaattaggagacttgaaaacatagaatatggaaaagtataggtccctggtgtctttgagaattctctggacttaaggagccacagtttctccatgacacctactcacacagagtctctgtgcacacaaatgagctgctatagtacaaatgagctatgcaaatgtgcagtgctaggctctgggactggctgaccaggttggctgcagcttcagggatgcttggcgtccccaagcaggaaggcactcgctatttggaggtggtacaattccttactcaagacagttttttgccttgagcattgcctgctgttagaactgccacaccactccccacctccccagtcatgccaaggattaagaatttatttccttgtgacgctcctcagtctgaggctgctgatcccaagctgtccaccgcagagagcagtgcgtggctaaaaccagggccaggaatttatattcaccctttcacacttcttggctttccacagaagagagtctccttttcatgtcctcttaaaatccatttcagcatagggaagggaggcagataacattttgtgggctggggctgaggcatgaaacccctatgggaggcattcactctcatatccatgatctcatgacagcctcacaaccactggggacgtggggaaagatacacctgtctttcacagggatgagggagtcagaagagtccttggactcaaacatcttgactgaacacgccaggtcataatctcttatcaactctaaactccaccccccatccttaggttaaatgtctactgacagttcagaaccttaaacttagcccaagtggtaattgctacctgtgtatattaatgaacacaacatgtaccaggtgtagctcatacttcaagaggggtaaaagatgaccatctgaattcctgctcattaaataacagctcaatggctaatatataaaagtaagtaaaaaaaaaaaataaataaaagatagctattaataacaactttttaaaaactttttttaaattttaattttttatagagacgagtcttgctatgttgcccaggctggtcttgaactcctggcctcaagtgatcctcccacatccttcccagtccccaaagtattgagatgacaggcatgagccaccatgcctggccagatataaattataataacaacaatacctccactttttaagcatttcctgtgggtggggcactgagctgcacaatctgtaatctttactgtgccttatctttaccaccatcatggagaataggtgctactgaccccagtttacagatgatgaagtaaagtgtcacaggttttgttcggtttgtgcaaggaggatgggatccacgaccagctctgtcatctctcaacctacctaggaggaaagagtaacgaggtgccagcaaaggtgaaaataagagacatttaatacatcgtgcccatgacattaatctcaggaagctttctgaaagaggagaggttttgcagcaccagctttttcttttttcccccctttgagcagagtcttcttgctctgttgctcaggctggagtgcagtggcatgatctcagctcactaaaacctctgcctcctgggttcaagtgattcttgtgcctcagactcccaagtaggtgggactacaggtgtgtgccaccatgctcagttaatttttgtatttttagtagagatggggtttcatcatgttggtcaggctggtcttgaactcctggcctcaagtgatacacctgcctcggcctcccaaagtgttgggattataggcgtgagccatcgtgcctggccagcaccagcttttatacacagcaatacccacttccaaaactcttctcagagaaatgcaattccaagacacatgggcctaaattctctggttcaaaacaaaacgtttttgaaaatgctaaataaagggctacctgagtacagtggcagggagggggtgcagggggaaaagaggggattaacaataaaagagccagcagcaacagtgaactcagatggataaatgggtccagaagagtcacacacaggcccaatggtgatggggaagcctgaggtcattatcttaccattaactacctttcgccaggctctaagccaatgggactggttaagtggaatggagccaggaagtatggacagcagcccgagaagaccaggataggggtgggcagcgcagtgtgtctgttctaagggtgtcagctccccacctaggacaatctgagtcccaggaggctggctgtggagggagcacttcttccctacatgcccctctttccttctttttcttaacttccactcctgctgcctagaggaaggcttccctgatccctggagtttgggaaccctgtgctaactctctattgctcactctgtattaagttgcccatttttctcatttccttcccctggattccgggacacaggaccttggtcctactttctgttgacccaacaactaccttaagggccggcctactgtaactactcaaaaaaagagttgttaaatgaatgtaaggtgctcagtgtccaccaatttgcattaaagtgtacaggggctatggaagcaagaagataacaaagataagatgcaagcccttcattacaacaatgtccactttaacaaacacatgcccaactcttgatttatgctgggttcttccaagaatgagttcattcctatgcttacaccaagcccaatttacttggggaatgaaaaatcgtgttatttatttagtcttccttttgtacattttaaaatcccttctctgtttttatttctacaggtctggcagcttgttaaaaatgtcattttctccctgcacgctgatgagggtagaaaatttgtgtttcaccagccctgacaaatagcattatttgtaaatcaagttaaatgcatgcacagtgcggttcaaactgaaccttctcctggccttcctccatgtctgaactgaagaataaaaagctgtagaacctcctcatggcttctgcaatgacaaaccctgcaccagtccaaaaagcaatgactccctccctctgcacagaaaactgagctcgaaccaatgtctgaccacttcccttcttgatccaagatatcctttccagcaaggccagcctggatcaggcctcggattaggaggatgtttggcattcctactgttctcacccccagggcaggcactgtgcagagtctgtcccgtgacctgcattcttgtcagtgtttaatccttttgtctggcccctgcacttaagtggttataaaatatcttgagaatccaatgacagtttgtggaatgtcagctgatgccaccaacctcaccttcccattttctctcccactgttgcatcactagcctctgccttgtgactttgacagtcagggctgccacctcactcctgagcctttggtaccgaatacacaaacaagacctcagaactctgtgtaggctgatatagcacattcacaaaaaattctagaacacccaacttactatgaacgctgcatgaagctagttgtctatggaaagtttaatctttcccgtctgggtatgtgaatgcataaatgtagagatacatgggtgtatccatgggacataacatttgggttatggttgaagatttgatgccacatattattgatttacaggaatatctttgcatgaaggttgagtccttagggattagagaggcccacaagtctagattctgccatttccttaggcagaagtacaacagtaccctggggaagatggtctgtggagctgaatcacctctccctcctcctcctccagctggccatgcttcccacagttcctttgagaagcagacagagccagctagctccctggcactctcattctggaaagaggctgtgggacagaaagaaaatttaagcactggattgaggagaggtggaccagatggcccaaaggatgccttcatgccctgatatttactcactggacaaaggagtattgagcaggccctacatgtcaggtagcactctgagcactgggacgccatgaagcaagagtactccaggagctgcccattcatggattttgcaattcagtgacagccagagtctcctcacacccttcttcctatacctccttaatcccattcctccttcagctcaagcgtgcatgaacagagcaacagaaaccatactctggttcttactagttttaaacagaatgagttcaatcgtatcttcctgcagtccatagtctatagagcagccaaagacaactttcaaatgtcacccccccagtctgaacaccctccagtggctcctcctggcacttagaataataatcatgccctacaccttggccgactgggtcccatgagaactggcctctgcccacatctctgactgccccatcctcagtcaccatctacagctacaaagtccggctctcaatttcttgacagagaatgctaacttctatctcttgcacttgcacttgctgtgccctctgcctggaattcttctccaggatgtctctcaagctgcctataagcattcaaatagccccttctcagagaggccagcacagaccaacctgtgctcctggcactctctttctgttgccctgtttcatctccatcctggcatttaccaaggtcagaattcacacatgtatttgttttactggcttaccttctttctccccaaatgtaatgtatactgcatgagagaagggagtgttcctgttcttattcaccactgtgaccccagaccctgtactatgcctggcccacagtaatcttttaggaaatatttgttgaacctatgtcagattattcaacactcaccccattcctcatgggtttataaagcctaggtcataaagtgtctgaactgctggcaatgtttgcagggataattcatatgacaagtttctaaaaggatatagagaagttttctttcatctttgttttatacgacgctagctttctctctctagttaatggtatgattcgtcaagttctccaaatgccatctgctatgaaagcaagagcccaataaaaatgtctgcagaagaaatttcttaaagaacatctttagagatgtttatgtaaagtgatacaatgaaaccctgcacaaattaataactaaagcatttatgaatattagaaaggatgaggccaaaaattttcttggaacagtttttgtacatatgaggtaaaatgcagaagatgtcaaaggcctggcattgttatgtttcttttgccttttctttgcgtcccaaattattatggcatatacccaaaatccatctactgcttcagaagtatagatcattttccaaaagaagcatctggaatagctaatttgttaccaaagccggtgattaaacacacatgatactgtggggctgaatggctggccatgagtcccagttttccattgtattgggtttcagctattaaccaatcagtctgtttttagagtatgaatttgtaatgtagatggctcagaactcttggctacggggcccttaatgggacagcatttctgtcacatggaattcttgttgcttggtttccattaaggtatcttggcttttaaataaactgtcaagtaaaacttggcatcaaaacacaaagtgagtaacttcctttgttgagtcgttgacagctccgctgtgtgtcagatagatagctgctaagagtcagctctaaaggcgattgcagtctctttggaaggatgctggtatcacaaactgccttcctcaggattaaggctaagcaaaatttagggataatctttatggaaagttaacccagcaacggccagtcgaccatatccctctccacaagtgttggttttggaattataaaagttttggaggtgtgaaaacataattggaaaactttttttccctgcttaaagggctaattgatttcacaggtgtttaattatcatttgctgtgagataataccttgtagtgccataaaaaatggatttaattttctagtgcttgcaaaaccatttccaaagccaagtcagagctaaagctagataactattctataaatcaaacacactgcctcctttctttgaaatttttaatacttggggataatgatatctgacaaccttgaaactaacatgaaaaggatttttctgccaagtgccaaaagtcaaccattggagcatttcaggcagtttggttcattaacagtgactcaggcagcctcaggaccctgcctgcaggcttccaaaacaccccaagggtagaccattggtgtgtgtcaggacacaatattatctaccaagaccaaatggtcatatatccaataaggtctacagaaaaacagaaataaaacccaaaccacccttagcacaaaaaactgcctggaaacaactgtaactctctaagctcaaactaagagtcctggaacttagaaagtggagatgtttcaacttgatcaagggatactttcctatcttatgcttaaggcacaacacttgtgctttctgtaataacaagggagggaatcataaaatcaaacaaatgttaacagctggaaggcaccacaaagatcatccagtccaaatatccagatgaaaaaaagcagccaggagaggtcaagtaacttacccaagatatcaccaggggcagaaccaagataaaaagaataattctgagtgagcagagaaaggaaaagaaagcttgaaaatagatttagagtcccattctcacccaaaatctaaaaatacaaggaagaatttttaaaaagacaaaaaaaaaaaaagtgaggtttcattctgtaagaggagtggctatttcttcaacggagcccagtttccacagaagtgcttaagctgccttaaataactacatgggggttttagttggtgccacgtttcggatttttttttttctctccaacttctattcagaagctgctgaaatcctaccatgttccattagattaagtgtgcttaaatgatctaagaaagcagtgcaatttagctggacacacacacacacacacacacacacacacacaccattatttaatttatttaatgcatttgtatggagggtgcacataccctaaaccactaaatgacaaagatttttcaggcagttcaggttggccttcacagtgctggataaaataatatacagcaatatgcagtataattggtgccattcttggacactgtgtttgggccctggtagtaaaagcctgggccaaagtcatgtgggctgaaagggcaggggacaacatgggccccagtatagtctgaaaagggttggaatggaagggcatccatagggactggcttgggattgcaatgaaactccttcaatgaataaaaatggtggtaataactctagctaacatttattgagaacttattacatgcccaactctctgcaaagcactttatgtccatttggccatttgctcttccaaaaatcctatgaagtaagtagcattatatctcccattttgtagaagaggaaattgaggattacacctaatttgtctaaattcacttaataagcaggtgggtataatttgaactgaggcattgtgacttcaggacccaagttattgtacacaattgcacgttgcctcctttccataatgctttttggagatgtcccattggctagctaagtgagctctgtcatgagggacaccatgagaaccactatgaaatgcaagggactaatttatgtcttctaaccaaagatgtgcctgacatggggagagagcttttatgtggctctgaataagagataacatctttcccagggtcagccccatctcacacactacttccaggttttggggacttgatagaacaggtgagaaataaatgcctgttcatttgctatatttatctcagccaggaccaccaatggaacatagaaacttcaaggcctcttcctaagactttatatgactcttagtttcccaatccatcatgaggctttggtgccaagacccacaacatgaattttagttccctaataagcttgtggagtctctactatgtgtgcaggtctttaagcccatatggacaaaattgggaagagacataaaacaaatactgcaggagacaatgagattccattcattcatccatccatccatttaccaatagcacttattacgtacccactaagcaccaggcattctattgtcaggatacaatggtgggcaaaataaaaaatcctgttcctttaccattcagaattatggaattcactgtcttgcgtagggagactgatagtaaataattaatcatataataaaatcaacagctatagtagttccaaggagagactcatggttctgtgagagcacacatggtagaggaacttgacctagtcagggggtggggacgaagctgaaacctaagcgctaagtgtccagcaggactggggttcagaatgcagtgctttgagcagtgctgacagtagatgcaaaagtcatcaagaaatttaaagtacttttgggaaaacgaagtatgtgtaccataattagtcatctcaaaaagtcaaaaatattttgctgtgatgtagactaaatccatcggatggtttgcaaaacaaaggttaggactccatgctgcctggaaaaatgattaaagactggatgtctgaggccgggcatggtgtctcacgcctgtgatcccagcacttggggaggctgaggagggcagatcatttgaggtcaggagttcaagactggcctggccaacatggtgaaaccccctctctactaaaaatataaaaattagccaggtatggtggtgtgcacctgtaattccagctactcggaaggctgaggcaggagaatcacgtgtctggatggataaacactttcattcagttaaacatgttgatcatatcagagcattccagattccacatacctgctaagcaataactaaggcaacggacattgacccacgttacagatagtaaagctgcatcagaaaagagccttaacaacttgattagagttaatgaaagatacttcaagttgttctagttcatcttatctgctcttccctggaaacctggcaactcacatttttagcacttatttataagcccctttcctattgccgcaaaattctacaggctctgtagaaatggggctgagtctctaaataatcacattttgatggtaattaaaagccaaattccctaactccctaaatgctatgagcagtttgaatgcctgtgttttgtcctaacattgagcatctctacgaagaaggaaaaccatgttagaaaatactgaaatgacttaattgcagaaagaggcagccttatgatgaagtagcagtgagcttctgctgggatggtacactcaggggaggaagctgctcacaggaagaacgcccaggagcgctggcctcagcccttcttcaagtactcactgctatgaggcctgggccgaggtcctacaggccaggagaagccctaagatgacatctttctgctatggtgacaagtccttcccattgactctaatagttgttaaggtaagagaggtaaagaagggaatttcagttattaaggcattagtttggattggagctgggaacaaaggaaaagccacaactgggcttcatccagcaaagacactattttcatccatctgcctcctagactaatttagggattacaggacctacccagggacctccgatgcagcaaagtaaggatcatattgtgaaggtagaccaggccaaaccattgccacctctaactttaaggctgctaatctcttagaaaaaaactggaagaaaaagttggagagggcagtagggggagaaaacacacacacacacatacacacacacaccatatatatatttaaagaccaccaaatacatttttcatctttaaatcaaagtcctgcatagaaaaagaaagctgctggtaagtgttaaaggaaaggcttgttgccaataatataaaacatgtttataaaataataccttagcatgtagaaataacaatgataatgatgatataacagccacactgttgagagcacactcattcgctgaacactatgctaattacatacagtattgcgtcctaagtgtcacaatctgtaacactaatactatggtcccatttcacagctgcacaccaaggctgacagagatgtgataatttgcccagagttatatagccagagaagcataactagaacctgaacatagccctctgaatctgaagtagatgctgctgaacttcacttgcattttttttaccagcagttttgatgccatatggagaaataggtataaatgaaatctttcaaagcaatgagcactgaaaagattttggtgcccattgcaatgagtaattcaaataatgaactactaaaccttaaaatgcagaacttatatgtatgctatgctgacattaaaatggcttgtttataggttttctgattgctgcattctggataagataaagcagtcatatcctctctccccactgctttgataggatgctaagcacatgtaaagttgtcggaaatcatctcaaacctaaaacaccaaactaagtggcaggtctgctcagctagttgtaaatatgggcctagcttcactttattgcactttgcagatcttgagtttttgtttttgtttttaacaaattgaaggtctatggcaaccctaagcaagtctatcggcaccatttttccaacaacgtgctcaattcctgtctctatcacattttggtaattctcataatatttcaaaacttttattgttattgtatgttagggtgatttgtgatcaatgctctttgatatgttactactgtaattgttttgggatgtcacaaaactcacccatattaagatggtgaacttgaaaaatgtgtgtgttctgactatgctaccaaccagccatttcccctccctctctctttgggcctccttgttccctgagacacaaaaatattgaaattaggccaattaataaccctacaatggcctacaagtgtgcaagtgaaaggaagagtcacacgtctctcactttatttatttatttagagacggagtctcacactgtcaccctggctggagggcaatggtgcgatctcggctcactgcaacctccgcctcccaggttcaagcgattctcctgcctcagcctcctgagtagttgggattacaggtgctcaccaccatgcctggctaattttttgtatttttagtagagacagggtttcactatgttggccaggctggtctcaaacacccgacctcaggtgatccacccgcctcggcctcccaaagtgctgggattacaggcgtaagccaccatgcccggccgcatctctctttaaatccaaggctagagatgattaagcttagtgaagaaggaatgttgaaaggcatgacaggttgaaagctatgcctctcatgccaaacagccaagtcatgaatgcaaaggaaaagttcttgaaggaagttaaaagtgttactccagtgaacacatgaatgataagagggagaaacagctttattgctgatttggaaaagttttagtggtctgcctagaagagcaaaccatccacaacattccccttaagccaaagcagagtaaggctttttctttttttttttttttgtggggggacggagtctcgctctgttgcccaggctggagtgcagtggcgtgatctctgctcactgcaagttccgcctcccgggttcatgccattctcctgcctcagcctcccgagtagctgggactacaggcgccagccaccacgcctggctaaatttttttttttttttttttttttttagtagagacgggttttcatcgtgttagccaggatggtctcgatctcctgacctcatgatccgcccacctcggccgcccaaagtgttgggattacaggcgtgagccaccgcgcctggccaaggctttttcaattttatgatgacagagagaaatgtggaagctacagaagaaaagtttgaacctagcagaggttggctcatgaggctttaaaaaagaagccatttccatatcataatagcgcaaggtgaagcagcaagtactgatctagaagctgcagcaagttatccataagatcattgatgaggtggctttacaaaacaacagacatgcaacgtaaatgaaatagccttagattggaagaagatgccttctatgactttcatagctagggaacagaaatcaatgactggtgtaaaggtttggaaggacaggctgactctcttttaagaggctaatgcagctggtgacttgaagttgaagccaatgctcatttaccactccaaaaatcctaggacccttaagaattaacttaaaagctgtatatttagctttaaagctaaatctactctgcctgtgctctataaatagatggaacaataaagcctagatgacagcacatctgtttacagcatggttaactgaatattttaagcctaccgttgagacctacggcttagaaagaaaaatttcttttaaaatattgcgttcgttggcaagtcacctagttacccaagagctctaatggagatgtgtaagattaatgttgttttcatgcatgctaacacaacacccactctgcagcccatagatcaagaagtaattttggggccaggcacagtggctcatgcctgtaatcctggcaatttgagaggccaaagtgggaggaatgcttgaggccaggagttcaagaccaacctgggcaacatagcaagacctcatctctataatcaaaaaattcagccagactaggcatggtggctcacacctataatcctatatcatcctagcactttgaaaggccatggcaggaggattgcttgagcctaggagttcgagaccagcttgggcaacacggcaagacttccccccgccaaaaaaaaaaaaaagtcccagatggcagcatgcccctgtagtcccagatattcaggaagctgaggcaggagggtcacttgagaccaggagtttgtggttacagtgagctatgacagcaccactgcactccagcttgccagcttgagcaacagaacaaaactgactcaaaaaaacaaagtaattttaactttcaagtattgttattttaaaaatacattttataaggctatagctgacagagatggtgattcctctgatggatctgggcaaagtcaattgaaaatcttttagaaaggattcaccattctagatgccataaagaacattcataattcatgggagaaggtcaaaatatcaacattaacaggagtttggaagaagctgattccaaccttcatagatgactttgtggagttcaagacttcagaagaagtcactgcagatatggtagaactagcaagagatctataattagaagtgcagcctgaagatgtgactgaattgcagcaatcttataaaacttgaatggatgaggaattgcttcttatggatgagcaaataaagtggtttcttgagatggaatctactcctgatgaagatgctttgaacattgttggaatgataacaaaggacttagaatattacataaacttagttgacaaagcagtggcaggggttgagaggattgactccaactttgaaagaagatctactgtaggtaaaatgctatcaaacagcattctctatggagaaaacgattctttcatgaagactacagagaagtctctcatgaaaggaagagtcaatcgttgcggcaaactccactgttgtgttattttaagaaactgtcagccaggcacagtggctcacgcctgtaatcccagcactttgggaggctgaggcaggcagatcatttgaggtcaggagttcaagatcagcctggccagcatggtgaaaccccatctctactaaaaatacaaaaaagaaaattatctgggcatggtggcctatgcctgtagttccagctaccttggaggctgaggcaggagaatggcttgaacctgggaggcggaagttgcagtgagctgagattgtgccattgcgctccagcctgggtgacagggcaggactccatctcaaaaaaaaaaagaagaaagaaagaaagaaaagaaagaaggaaggaaggaaggaaggaaggaaggaaggaaggaaggaaggaaggaaggaaggcaggcaggcaggcaggcaggcaaggcaaggcaaggcaaggcaggaaggaaggaaggaaggaaggaaggaaggaaggaaagaaagaaagaaagaaagaaagaaagaaagaaagaaagaaagaaagaaagaaagaaagaaagaaattgccacagctaccctcactttcagcaaccaccacttgatcagccagcagccatcaacaaggcaagacccttcaccagcaaaatgattatggctcaccaaaggctcagatgatcacaagtacttttttagcagtaaagtatttttaaattaaggtatatatattgaggtttttttagacatgttattgcatacctaatagactacaatatagtgtaaatataacttttatatgtactggaaaaccagaaaaaatcatgtgatttgctttattgtgctctttgttttattttcgtggtctggaaccaaacacacaatatctctgacgtgtgtcttagaacttagtgttcaaaaacagaggcacaaaacccagccactagttcaaaaccttccccttgggaggctaagtggagactgtagaataaaaatgaggaagaataagtcagcaactacacaatatatatgtatttttaaaagaagaaaacaataattgagagatggtttcatgatcttctcactactcctgatttggaaatctggaaagtgtggtatgggtatgagggggattcttctagatggatatgttaggtgaatccttgtagggtagtgcaagttaaaggtataacacacccaactgaatgtacattcatggtgtatacacatatattgcttctgggtttttctatcaaaagcaagagccaaaagaaaaatactcaacaatgaaatgtgtccagtaaccttattcttctgagatattactgtctattttgttactttggaagctttttggttttactgaacatatattttgattatatgcatatgcatagtatttaacatcttttcaacatgaaaagtgtccatcaatggatgattggattaaataaatggtggtatgtatgtatataccatgggatactaactcagccatgcacacacatagaatgaaaatgaggctgggcacagtggctcacgcctgtaatcccagcactttgggaggccgaggtgggcagatcacctgaggtcaggagttcgggaacagcctggcccacatggtgcaaccctgactctactaaaaatacaaaaattagccggatatggtggtgggcacctgtaatcccagctacccgggaggctgaggcaggagaattgcttggacctgggaggcggaggttgcagtgagctgagatcacgctactgccctccagcctgggtaacagagcaagattctatctcaaaaaaaaaaaaaaaaaaaaaaaatgaaagaaaatgaaatcatgccttttgtagcaacatgggtggaactggaggccattattctaagtgaaatgactcagaaagagaaagccaaaaactgcatgttctcactcagaagtgggagctcaacaatgggtacacatggacatacagagtgaaagaacacatactggagactcctcaaggtgggagggtggaagggggatgagagaagaagaaatctacctattgggtacaatgtccactattcagatgatgggcaaactgaaagcccagccttcgccactatgcagtatgtccatgtcagacaactgcacttgtgccccctaaatctatttcaaataattggtgattcagtatgtcctttgtaaaggaaagagtatctattacatagataatctttgccagggactatctgcggttgcaaattggagaatcacaagcagtatccttctggcagatatatttggtttagtccctgttgaatctaaacatttttcttaaattaattgccaacattttcaaatcatgagatttcatgccaaaatccggatttcaggcatctcatgaaaaatgggaagatttggcagcactggacctgctgtactccctcacggcaaattagcagaagctgagctggcttgattcatttattacatcacttacctggcccctgtaggcatctgagttagtaacccctggtctacaggtaaaggggctaaaggtcagatacaactcatctcagatgctggaagcagctttcttagtcgaaataagcagctgtcattagtccaaatagggacgaacgatttgactttaatatgaaatgttttatgtgggctataaaattatccaaactcgacacaggacattttgagcttatttccaaatcatctggccttcatctacccactggaactattactctgctgggtcctcatggaaacatatctttcagccctaacaatgagactacagacatctacgtccccaacacaacagctaaaaagcagtagaatgtcagaaaggctatccacttagcccttggctgacaggccccactgagcatcctttgcgaagtccatttactagctaattcataatttacacaaggcattcagacatagcagctaagatataaaacatttatcaacacagggactagtttgttattttaaaataattatgtttaagtaagccaataaagtctatcttctccaatttacttattgagctttatgaggcaatttaagtcccgattttggggggtatgtatgaaaggagagcatggaaatgccatttgctccctgaagtttttatcttttttttttttttttttttttttgagatagagtcttgctctgtcacccaggctggagggcagtggcatgatcttggctcactgcaacctctgcctcccaggttcaagtttttcttgcacctcagcctcctgagtagctgggattacagatacgtgccaccacacccagctaatttttgtattttttagtagagatggggttttaccatgctggccaggctggccttgaactcctgaccttaagtgatccacccacctcagcctcccagagtgctgagattagagatgtgagccactgcacccggccttgaagtttttgtcttaaaaacccagatcctcaagagaagaccaaaaaatggttgtggtgctcatatctctgagacatcttgcagagaggtaatccctaaatgatgcaaatctggtgaacataatgcacacaggggacaaaccaaacggtgaaaactgatgttaaactataaattttaagccacggacattagtgtgaaactttacagcttcaaactttcaaaacccacacaaaagaatttgtacgacactgatgaaaatttagacactagagatgctcaatcatgcgctctgtaagcaaatcacacttcatggttaattttgttgccagcaggataataaagtgtgatacaaactctagcacagtctcagctgctgttaaagagtctgaatggacagggcattacaatcattaagaatgcagccacgcaattcaaccagtagatggggcacatccacatggcaagcgtcctcactgaaccagccaggtgggaaagaataggccctgcttcctgctctatagccccctaccaaagagttacagagatagccaaatgcagaaggtgaggctgcacctcatctctaaaagaagtatttgattatttccttaacttctctttcattcctatgacaatgtaaataaaacgggtggagactggtgggattaggaggaatcagggttgaccacctcagaagggagaaatatattgaatccactctataaaagcacctccttcagtagtcagtgagtcgcttattcttactggggaccagtgtttactgagtgctcattccatccaggcactgctggaattggatgttagatctacaaaggggaattagacaggaatgggatgtggtccgtggagactgtggcttactgacactgaagtcctgcaaatgccagtcacctgtggctacaaatcatgacagggaactaaacaggtgggcgtgagaatgcttatgggtggacagtggcatctcagtaaagatggggtgctcagaaatgccctctctgaagaagtgacattgaaactgagggctgaggacagaggagaagccagctccctaaagggagctgtgggaagaataattcgggaagtggaaagcatgtatgcagagccccaggttgcaacattctggacacactcaaggaacaatggaaactaagccagtctgggtgggagtggtggaggtgttggcagaggaaggaagggaagtgatatggtcaaaggtatttgactaacagggcagtgggcgttgttagctttgatgcatactcatgtactccacagaaaacacaaacacaaaattatatggtgcttaattttccagatgctattttaaactttttacttatataaccttcacttatttctcacaataactctaaaaggcaagtactattagtatcatcctctttttacagagcagaaaacaagtacagagaggtgaagtgacttgcccccagacacacagctactatgcactagaacccagactggaacggtagtggtctgattccaaagtgcatgctcttcacttctatattctcagaagcactgttttatttcaaggtgactctgtatattttgatatcactatgctaagtctaggtttttttttttttttggcatgtttgttgtttgtttgttgttgtgacacttttgtattgctttgctggcagacggctgatgcgggccaaataagaaatccacaatctggcacagagtacacgcctagacagatttatcatatgtcctgataatcaagcacaattgtgtaccccaacctttgccagatgccggcttcctcatgaatctgggttctgtacatggactccccaaaggacagtaaatcagcgcactagatatctctgcaaagtttccagcagatgcttgtcctgtgcttaccctgcccggctccagatggctccacatcctgctccttcctctcgcgggcacttcagatatgtcagcaacgcagggtgaggaagaaggtggaaggagcagaactaacgtagttctttaagaagccccgcagagcccagaggtattttatatatgcatatgaggagctctaagcccggtcagcataaatcactgccagcttttactacctggacccgattttcaaaaggatgaagttgtttacatgttgcagaaaaggtttctgctaccagttaacctgtcacctgctacaattcattccaatctcttccataggcaacaggttgtatggaattttcctgcactgacatattagcaagacaattctatacctactccgtcctctcaaaagggagagaacaacgctgagaaataggtcccagcaaaaagatgttaagaaaaaattcttaaagcgtatattgcaaatcaacaacaaaaacacaaaaatcagaaaaatttttaaaaagacttcattctttcccagactaaggaacaggtttacacacttttctttctccctaaattaaaagtatccttgaccttatccagtgatttacacacacagcactgtcactaagttttgcttgccttttttgggaacagtctagaccagggtgtccaatcttttggctttcctgggccaggatggaagaagaattgtcttgggccacacataaaatacactaacactaatgatagctgatgagctttaaaaaaaaatcgcgatcaggagcagtggctcacgcctgtaatcccagcactttgggaggccgaggcgggcggatcacgaggtcaggagatcgagaccatcctggctaacacggtgaaaccccgtctctactaaaaatacaaaaaattagcggggcatggtggggtgtgcctgcagtcccagctacttgggaggctgaggcaggagaatggcgtgaacccaggaggcggagcttgcggtgagcgcagatagcgccactgcactccagcctgggcgacagagcgagactctgcctcaaaaaaaaaaaaaaaatcgcaaaaaaaaaaaaaaatctcataatgcttcaggaaagttatgaatttgtgttgggccacattcaaagttgttctggtctgcatgtggcacaagggctgtgggatggacaagcttggtctagataatccctacttccttcctcttctccaaagatacacagatttttcaaaaaagtagaagctgtttttttttaaaaaaatagagttcataacactagtattcatttatttgcatcagaaattaattaccatgacagaaacccaaatgaacatctcagagccaggtgtgtttgagatgagctgactgactccatacaaacacttgttgattttgcttgaatcctctgtaaatttcacttcccacttattagattttcacagaggccagaagacccaaataaaatcttctttacttttttgagacagggtcttgctttgtcgctcaggctggtgtacagtggtgcaattatggctcactgcagccttgacctcccggtctcaagcaatcctggcacctcagcctcctgagtagctgggactacaggtctgcaccaccaaatctgcctaattttttaaaggttttttgaagagatgaggtatcactatgttgcccaggctggtctcccttacttttaaccagtggtaaagaggagcctatgaggtcatcttccattcagtggtatctagactttgtgattatagagcgagaaaaacatccagtggacttacttagaaatgacttccttttgtcttatacttactgagagatttatttccttcatccttcttgtaacctggggggcctggagaatttcacactcattgttccctatcttcctcattctacagacaaatgtagttatagataagattatttatttctgactgtcaagactcatagcaaaacttgcttgtattacaatattcatcctgtctggagatgatggcactaatcgtataaatcgtgtaaataaccaggtgtcttcacagactgaaagtctagaaatgcatctaggttgacaaatatttacaccgagttatattgctttaatttaccatcagttgaagggagaagggggtgagcaatatcacattaataaaggaagagggtattagagcttatcatttcatggaggcttgtctttcttgtgtatattctcaacatacaagaagttaagccaggagcagtggctcacacctgtaatctcagtactttgggaggtcaaggtgagtagatcacttcaggtcaggagtttgagaccagcctggccaacatggtgaaaccccatctctactaaaactacaaaaattagctgggcatggtggcacgtgcctgtaatcccagctactcaggaagctgaggcaggagaatcgcttgaacccgggaggcagaggttgcagtgagctgagattgcggcactgcactccagcctgggcgacacagtgagactcagtctcaaacaaagaagttaaactattaaaatctgaaaaatactaaaaatatttttaattcaaaatataattttcaattaagcagagacttcacctcagagataactgataaaaactgaggcacagagaagttaagtggctgaccaaggtgacacagctggtgaaggacacagccaggactctaaccagctccacatcacaaacgtgctgtaatgagctactggctgcccagccagccgactgaacaggttgtttataaaatggagcaaatactatcaatcccacttgcccttagaaatgcccagagaattaaccaagctcaaggacagtggggatggcacagaactgactgtacaggtgtaaagtgtgatgatttatgcaggaactagctatcaaagttacggaaacctagaattttatccattgttgggtatctcccagtagtgcatgattagccattcttgacgatgattctgtgagctgttagaagtttttgtgtgtctaagtagatctgtctgaaactattttcaggttgtatgaatctttgtctaggaatttgcttccctggcctacccaaaaaaaaaaaaaaaaaaaaaatgaagtgcattttgttctgttcacagatagctttctttcttgctactcttggccataagaccaactctaaaaacattggtgaccctgaaaatgtctcaaggacattcagtttactttccttgcctctaagccactccttcttttaaaaaagaa

SEQ ID NO: 30 - DNA, 143389 bp, Homo sapiens
gcttgcctggtgtgctcaaagaacaggaatgggacctgcatggaatgaacataacagagtgtccctggatgtaaagattgtaattaaagacaatgatggacatagagtagaatatccccaaaagcagacataaaatagtatctattgaaatattgaacattttaaatatatttctgtgcttttatgttgatatggtttgggtttatgtccctgcccatatcccatttcaaattgtaatccccaatgttggacaagaggactggtgggaggtgattggatcatggaggacaaatttcccccttgctgttcttgtgatagtgggtgcgttctcataagatctggttgtttaaaagtgtgtagcacctcccccttctctctcttccttctgctccagacatataggacatgcctgcttcccttgcaccttctgccatgattgtgagtttcctgaggcctcctcagccatgcttcctgtgcacactgaggaaccacaagccaattaaacctcttttctttataaattatgcaatctcaggtagttctttatatcagtgcaagaatgaactaacacagaaaagtggtaccaagagtagggtacctgaaaatgtggaagaaactttggaactgggtaatgggcagaggttggaagagtgtggagggctcagaagaagacaggaggatgagggaaggtttggaacttcctggagacttgttaaattgttgtggccaaaatgctgatagcgatatggacaatgaagtccaggctgatgaggtctcagatggaggtgaggaactcattgagaactagagcaaaggtcacttttgttaagcattagcaaagagatttcagccgttatgcccatgccctagagatctgtggaattttgaacttgagagagatgacttagggtatctggtgggagaaatttctaagcagcaaagtgttcaagacatggcctggctgcttctaacagtgtatgcttatatgtgtgagaaaagagatgatctaaaactggacttatatttaaatggaaagtagaacatgaaagtttggaaaatttgcagcccagccatatggtagaatattaaaaacccattttctggcgaggaattcaagctggctgcagaaatttgcacaagcaaagaggagccaaatgttaatagccaagataatggggaaaattccttgaaaattacaaagaccttcactgcaggccctcccatcacaggcctggaggcctagtagggaagaatggttctgtgggccaggccctgctgccctgctgccctgcacaacctagggacactgatccctgcaacccagccactccagctccagccatagataaaagggcctaagatacaccttaggccattgctccagatggtgctagttgtaagccttggtggcttccacatggtgtttagcctgcaggtgcacagagggcaagagttcaggtttgggagcctctgcctagatttcagaggaatgtatggaaatgcctggatgtccaggcagaagtctgctgcaggggtggagtcctcatgaagaccctctattatggcagtgcagaggggaaatgtggggttggagcccccacatggtgtccccactggggcactgcctagtagagctttgagaagagggccaccatcctccagaccccagagtggtatatccactgacagctttgcaccatggaaaagttttaggcactcaatgccagcccttgaggtcagccatgggagctgagccctgcaaagccacaatggtggagctgcacaagacattggtaggccaccccttgcaacagtgtggcctggatgtgagatatggagtcaaaggagattattttggaattttaagatttaatggctgccctgctgggtttcaaacttgtgtggggcctgtagcccttttgttttggctgatttctccctttcagaatggcagtatttagccagtgcctatactctcattgtatcttgaaagtaattaacttgtttttttttttttattttacaggctcattggcagaagggacttgccttatctgagattagactttggattatggacttttgagttaatgctgaaattagttaaaggacatgagatctggaaggatacagggcagaatgatatgatttggatttgtgtccctccccaatctcatgtcaaattctaattcccagtgttagacaaggggccttgtgggaggtgattggatcataggggtagacctcccatttgcagttctcaggatagtgagtgagttctcatgagatctagttgtttaaaagtgcgtagcacctcccccttctttctcttcctcctgctccagaaacgtaggatgttcctgcttccccttcaacttctgccatgattgtaagtttcctgaagcctcgccagccatgcttcctgtacaacttgaggaactgttagccaattaaacctctgttctttagaaattagccagtctcaggtagttctttctaacaatgcaagaatggactaatacacatggttacaaacagagtcattttttttctacttaagaattctcattccttcttttcatgcaggcttactagaaattgactttcacagtgtttgtttgaaaatgtctttatttcatcttcacttgtgaaagataatttttcagggtaaagcattctatgttggcatcattttgctttcagaaatgtaaatattctttccattgttttttgtcttctatgtttcctgttttcctgttcagaaatcaactatctaattagagcaaagtttatagtttgatccttttgggcttggttgtttttcaaattttcttttccttggttttcagcaggcttattttgaagcatctcaatgtgcttttcttgcatttgttttgcttggaattcatatggatttgtgtatgtatggtttgatatcattaatcaatttggggaaattctcaatgattttctattcatatattgtttgtccattttttttcttttaaaactataaatctacatatgtttggtacttttattgcctcataaattgtttatgcccactctttctttctttctctttctttccttctttctctttctttcttgccttctttttcttttctctttctctttcttttctttttctttctctctctctcttccttccttcatctttgctttcttccttccttctttctttcctttcctcttttctccttctttcctttctatcttttttgtttatttctctctatgcttaatctggacttttctactttagattttccagtttagtaataacctcttcagctatgttcaatctgttacagtttccatttaattctttgttttttaaatagatctcagatttggtgaaagttcccatattgtcatctatttcctttaacatattaatcacagttactttaaagcttatgtctgactaactccaattttgtatcacctgtagttttgttcctatgatttatttttctctttgtcttatttttgatagaaattatactttttgattgaatgctggatattatatatgaaaaactataagcacttccattcatgttattttcctccagagaagattcactcaatcatatatggcagatagcgaaaataggacatgtctccattaactattgctgcgtaacaacattacccagagttaattgcattaaaaaaaaatcataatcccagcactttgggaggccgaggcaggaggatcacttgaacccaggagttcaagaccagcctgggcaatgtagtgaaaccccatctctacaaaacatgcaaatattagctgggagtggtggcgtatgcctgtagttccagctacttcgggggctgaagtgagaggatcacttgagtccaggctgtcaaggctgcagtgagccaagattgtgccactgcactccagcctgggcaacaagagtgaaactctgtctcaaaaacaaaacaaaactaagcacttatcaagcttgtgattctgtgggttaggaattcaggcaggatccagcagggatacctcagctctgctccatgttgtctatagtcacagctggggtgattcaaatggctgaagacaattgggacaacttaaataaagccctatgtatggagcctctgtttttgtccacatggtgtctcctgtggagctagctcctttactcacatatttattccctgggctgggatggctggaacagatgagagttggctagactcactttcaacacattgtggtcttaaggtagtatgacttcttcatgacaagtggcttcccacagagtgggcatgtcagtagagaactttccaaaaggcctaagtgaaagcagcaacgcttcttatagtcttagtctcagaaatcacacaaggtcactttcagggcatatttatacatatggcagattcggggaatgaacatcaaaagaggaaaaaacatagtgaagtagatcatgtcattctaattaacaaattcaaggtggcatttcagactttgaaagtttaggcaatttctgtttgcctccagtcctagagttagcccttcaggggtcacgactgagtccaaggtacttagaacttttcttcctttgtggctgttagattaccatttgtgtctccttactactggaaagctgatgaaactccttttgacttttatcctatgacttttactcaaaatctaggacattttcccttctctccaaaatcttcttcccagaatcttgatttctcaagtcatgtctgcttttgttgtcacaaatctaatttttatctcttcagcatcatgagattcccaagggctctgctggattctctgtctcttgtgtcatttctctgttcagcttctcagccactcatctaacaaagcttatcaataggcaaataccccatggataaattaggggacagaacattgtgcttgcctcattaagttcccttttcctctcaatacgtgcctcaagttctgcataccttgaaagcttccccacttatacaaacatattttttgtgcctttctaattgttcttgacagtaggtttggtctactacaagtgacaccaccatcatcagaagtagaagtccatagccttttatttgaatgattttcactggctcaccactcacaatagctcatgtactgtttctgattatcatattctctaactttgtgacgtattttcaccatatggaatcttcttgtttttttttacccagctttcatggggatgatgatatccctgatcccccaggaccataatgtcccttgtccttgatgcagacactgtctatatttcttttagattcccccaaataaatacccactcagaagatatctagtcacaagcctttggttaaactagagctagaccttttttttttttttttttttttttctgagacagagtcttgctctgtcgcccaggctggagtgcagtagctcaatctcagctcactgcaaactccatctcccggactgttcaagcaattccctgcctcagcctccccagtagcttggcaccacgcccagctaatttttgtatttttagtacagactaggattccccatcttggccaggatgatcttgaacttctgacctcgcaatccacccgcctgggattacaggcgtgagccactgctgggattacacgcatgagccactgcgcccggccaagctagactttaatagcttaccctagtctatacagcagaaccagggtataagccacatcatgtctttcacatcccacttatggtagaataatatactgaaacatgttccagacctatttacaaagctgttgtgtgttctcatactctgattcataatgtattacatgactttaaggttgctgctttgcatacccattaccaaaatagaaaaaatctaacttaataataataaatcggtttttaaaaaataccatctatactcattccttcttccctccagagtacagtaatttttacagcaggctgctaaatatatcaagggataaaccaccactcatctggtggtataaagaagaaagtgaatattaaaaacaaaaatggcaaaaagggcctcagcttcctgcttcacctgttagttttctttcctgagcactgagcttgccaagattgatgtcagatgcagcctcaaactcccctgcattaacagaaagcattaggttctcaggtgagaaagtttttctttagtgacaactcttgcagacaaatccagttaatatgcctgtgtgtgcatgtgcacatgcacacatattcatgtatactaacagcttgatagatgagaaatggctttctgatgatttttaaatcaatttttatagtttaagggctttttttccagaagaggagaaaactttatttaggtagtcaagtgtttgaacttgctgacaggcacttcgcaaataatttttgagtgaataaatgaatgtgaataattgaatgactagtggactcttgcattccttcttcaataaaaaccaaaagcaaagcaaagcaaaacacaacaaacaaacacagaaatccagttctcctaagactagcacaaaaggagatctgctacttggggagcatgataaggtagactatccattttaactttctgctctagatttctcacagcacaggaaaaacaagggcctgtatgttaaaaagttattttactaaagttgggggataacaaaaagaaaaacaaaagaagcatgagatcatctattctgtttggcaagacacaatgttctctgtgttcaaaaattgagttcttaagaatcacaataaaatgatacaggagctgacagataaaatagcctgtataaaaaagaacctaacaaaactgacagaactgaaaaacacactacaagaatttcacaatgcaatcacaggtattaacagtagaacagaccaagctgaagaaagaatcttggaacttgaagactgactctaaaataagggagtcagaaaaaaataaagaaaaaagaatggaaaggaatgaacaaaacttcaagaaatatgggattatataaaaatgtcaaatcaacaaatcactggaatccctgaaaggaacagggaaaaaccaaacaacctggaaaatatatttcagtatatcatctgtgaaaacttccccaacctcactggagtggccaacagtcaaattcaggaaatccagagaacccctgcaacattctatacaagaagatcatccccaagacacaaattcatcagattttccaaggtcaaaatgaaagaaaggatgttaaaggtaaccagagagaatgcacagtggtcacctacaaacagaatcccatcaggctaagagcagacctctcagcagggaccctacaagccagaagagatgggggatctatattcaacattcaagaaaaaaaaatctttaaccaagaatttcatatctagccaaactaagcttccttagcaaaggtggaataagattcttttcagataagcaaatgctgggggagttcattaaccccacacccaccttacaagagatcttgaaaggagcactaaatatggaaaggaaagatcattaacagccaatacaaaaacacatttaagtatacagagcagtgatactataaagcaaccacacagtaataaccagctaacaacacaatgacagtataaaattctcacatatcaatgctaactttgcaaatatgttaaatgccccattaaaaagacataaagtggcaagctggataaagaagcaagattgaatggtatgctgtcttcaagagatccatcttacaagcaatgacagccataggctcaaaataaatggatgaaggaaaatctaccaagcaaatggaaatcagaaaaagcaagggttgcaatcttaatttcagacaaaacagactttaaaccaacaaaggtcaaaaaagacaaggccattacataatggaaaaggttcaattcaatgaaaagaactaactatcctaaacatatatgcaaccaccaaggagcacacagattcataaagcaagttcttaaagacctacaaagagacttagactcccacacaataatagtgagagaattcaaccctccactgacagtattagacaatgttaagcagatcatcaaggcagaaaattaataaagatattctggacctgacatcaacattggatcaaatgtatctgatagatgtctaccaaactctccatgccaaaacaacaaaatatacattcttctcatcaccacatggcacataccctaaaactgaccacacaatcaaacataaaacaatcctcagcaaatgcaaaagaattgaaattatactaagcacactctcagactacagcacaatgaaaatagaagttaagtcttaaaaaaatcactcagaaccatgcaattacatggaaattaaacaacctgctccagaataacttttgggtcgataatgaaattaaggcagaaatcaagaagttctttgaaactaccgagaataaagatacaacataccaaaatctccagaacacagttaaggcagtgttaagagggaaatgtatagcactaaatggctccatcaaaaagttagaaaaagctcaaattaatgacctaatatcacgactaaaagaactagagaagcaagatcaaaccaactccaaagctagcagagcacaagaaaccaccaaaatccacgctgaactgaaggagattgagacacaaaaaaccattcaaaagatcaatgaatccaggatttaattttttgcaaaaaaaaaaaaaaaaaaaagataggccactagctacactaataaagaagaaaagagggaagatccaagtaaactcagttagaaaaggccaagagcatgttaccactgaccccacagaaatacaaacaaccatcagagacaactacaaacacctctatacacacaaactattaatagaaaacctagaagagatagataaattcctggacacgtacaccctcccaaaactgaatcagggaggaattggttccctgaacaggccaataatgagctctgaaattgaatcaataatgaatatcttaccaatcaaaaagagcccagagtcagaaggattcacagctgaattctaccagatgtacaaagaaaagctgttatcattcctactgaaactcttccaaaagaattgaggaagaaggactcctcccctacccattctacgaggccagcatcatcctgataccaaaacctggcagagacacaacaaaaaaataaaacttcaggccaatacaatatccttgatgaacactgatgcaaaactcctcaagaaaatcttgtaaaccaaatccagcagcacctcaaaaagctaacccatcacaatcaagtaggttttattcctgggatgcaaggttggttcaacacacacatatcaataaatgtgattcatcacataaacagaacaaaagacaaaaaacacatgattatctcaatagatgcagaaaagtcttttgataacattcaacatccctttatgttaaaaactcaatagattgggtactaaaggaacatacctcaaaataataagagccatctatgacaaatccaggctgggcacagtggctcatgcctgtaatcccaacacttcgggaggtcaaggcaggcagatcacttgaagagtttgagatcggtatagccaacatggtgaaacccaatctatactgaaaatacaaaaattagccaggtgtgccctctccctctccctctccctctccaggtgtgccctctccctttccctctccctctccctctcccctttgcacggtctccctctgatgccaagccaaggctggactgcactgccgccatctcagctcactgcaacctccctgcctgattctcctgcctcagcctgcccagtgcctgggactgcaggcgcgcgccgccacgcctgactggtttttgtattttttggtgaagacagggtttcgccgtgttggccaggctggtctccagctcctgaccacgagtgatctgcctcgggctcccaaggtgctgggactgcagacggagtctcgctcactcagtgctcaatgttgcccaggctggagtgcagtggcgtgatctcggctcgctacaacctccacctcccagccgcctgccttggcctcccaaagtgccgagattgcagcctcttcccggccgtcatcctgtctaggaagtgatgagcgtctctgcccggctgcccatcgtctgggatgtggggagcgcctctgccccgctgccccatctgggatgtgaggagcgcctctgcccggccgcgaccccgtctgggaactgaggagtgcctctgcccggcggcgaccctgtctgggaactgaggagtgtctctgccccgccgccacccggtctgggaggtgaggagcgtctctgaccagccgccccgtctgagaagtgaggagcccctccgcccggcagccacccagtctgagaagtgaggagcccctctgccccgcagccgcccggcctgggaagtgaggagcgtctccgcccagcagccgccccgtccgggaggtgtacccaacagctcattgagaacgggccatgatgacgatggtggttttgtcgaatagaaaggggggaaatgtggggaaaagaaagagagatcggactgttactgtgtctgtgtggaaagaagtagacataggagactccattttgttctgtactaagaaaaattcttttgccttgggatgctgttaatctataaccttgcccccaaccctgtgctctctgaaacatgtgctgtgtccactaagggttaaatggattaagggcggtgcaagatgtgctttgttaaacagaggcttgaaggcaccatgctcgttaagagtcatcaccactccctaatctcaagtacccagggacacaaacactgcggaaggcggcagggccctctgcctaggaaaaccagagatctttgttcacatgtttatctgctgaccttccctccactatcgtcctatgaccctgccaaatccccctctccgagaaacacccaagaatgatcaataaatactaaaaaaaaaaaaaaaaaaaaaaaaaaatttgccaggtgtgatggtgcaaccctgtaatcccagctagtcgggaggctgaggtaggagaatcacttgaacccaggagctggaggttgtggtgagccatgcactccagcttgggcgacagagtgagactacatcaaaaaaaaaaaaaaattctgaaaacaaacccacagccaacatcatactgaatgggcaaaggatggaagcattccccttgaaaacaaaaacaagcacaagacaaggatgccctctctcaccactcctatttaacacagtattgaagtccaggccagaacaatcaggcaagataaagaaataaagagtatttaaataggatgaggggaagtaaaactatccctgttttcatacaacttgattctatatgtagaaaaccccatagcgtcagccgaaatgcctgttcagctaataaaaaactgcagagaagtttgaggatataaaatcattgtacagtggcagttcctcagggatctagaactagaaataccatttgacccagccatcccattactgggtatatacccaaaggattataaatcatgctgctataaagacacatgcacacgtatgtttattgtggcactattcacaatagcaaagacttggaaccaacccaaatgtccatcaatgatagactggattaagaaaatgtggcacatatacaccgtggaatactatgcagccataaaaaatggtgagttcatgtcctttgtagggacatggatgaagctggaaaccatcattctcagcaaactatcgcaaggacaaaaaaccaaacactgcatgttctcactcataggtgggaactgaacaatgagaacacatggacacaggaaggggaacatcacacaccgggacctgttgtggggtggggggaagggggagggataggatttggagatatacctaatgttaaatgacgagttaatgggtgcagcacaccaacatggcacatgtatacatatgtaactaacctgcacgttgtgcacatgtaccctaaaacttaaagtataataaaaaaatttaaaaaataaaatcactgtgcaaaaatcactagcatttgggtataccaacaacagccaatctcagagccaaatcaggaacgcaatcccattcacaattgccacaaaaagaataaaatacctaggaatgcaggtaactagggagatgaaagatttctataaggagaactacaaaacactgttccaagaaatcagagatgacacaaacaaatgggaaaacattccatgctcatggataggaagaatcaatagcattaaaatgaccatactgcccaaagcaatttacagattccatgctattcctatcaaactaccaatgacattctttacagaacttgaaggaactacttaaaaattcatatgaaaccaaaaaagagcccaaatagccaaggcaatcctaagcaaaaggaataccatgttaactggctttaaactatactacaggactacagtaaccaaaatcatggtagttgtacaaaaacagacacatagaccaatggaacagaatagagaacgcagaaataatgccacacacctataaccatctgatcttcagcaaagctgacaaagacaagcaatggggaaaggactctgtagtcagtaggtggtgctgggataacaagctagtcatgtatagaagattgaaactaaaactctactttccaccatatacaaaaatcaattcaagatggactaaagacttaaattttaaaatgcaaaactataaaaaccctagatgaaaacctaggaaatagcattctggacattagccctgaaaagacttcatgacgaagactccaaaagcactcacaacaaaagcaacaattgaaaaaaggggtctaattaaactaaagtgcttctgcagagcaaaataaactatcaatatagtaaacaacctacagaatgggagaaaatatttgcagattttatatcggacaaaggtctaatatctaccatctataaggaatttaacaaattttccagaaaaaaacaaacaactccattaaaaagtgggccaagggccgggggcggtggctcatgcctataatcccagcacttttgggaggctgaggtgggcggatcacctgaggtcaggagttcgagactagcctggccaacatggtgaaaccccatctctactaaaaatacaaaaattagccaggtgtggcggcaggcacctctaattccaactacttgggaggctgaggcaggagaatcacttgaacctggggggcggagtttgcaataagccaagatcacaccacttcactccagcctgagcgaaagagtgagattccaactgagaaaaaaaaaaaaaaaagtgggcgaagtacatgaacagacacttttcagaagaaaacatatgtatggccaacaagcatatgaaaaaaagctcaatatcactgatcattagagaagtgcaaatcaaaccacagtgagataccatctcacactaatcagaattgctattattaaaaagtcaaaaaataacagatgctggtgaggttgtggaaaaaagggaatgcttatacactgttagtgggagtttaaattagtttaaattagtgggagtttaaaaccattgtggaaagcagtgtggtgattccttaaagagataaaaacagaattaccatttgaaccagcaatcctattactggatatatacccaaaataatataaatcattttaccataaactcacaagcacgcatatgttcactgcattactattcataatagcaaagacatggaatcaactaaaagcttatcaatgacagattggataaagaaaatgtcgtacatatacaccatggaatattatactgccttaaaaaaagaatgagatcatatcttttgcaggaacatgaatacagcttaaggccattatccttagcaaagtaacacagaaacagaaaacaaaatactgcatgttctcacttataagtgggagctaaatgatgagaacacatggacccatagatgggaacacagaaactggggcctacttgagggtgaagggtgggaggagggagaggataagaaaaaataacaattgagtactagacttagcacctgcctgacgaaataatctgtacaacaaactcctgtggcatgagtttctctatattacaaacctgcacatagtaccccaaacctaaaataaaagttttaaaaattcagttctatcaacacataaccctctgaacaaagtacttccaactacctactctgtttccatgtcttagaggacatattcaaccatccctatctgaatgtgccttcccaagccttcgaaattcttccaagttattcaacaaacaatcattgagtactaactctggatcaggcactatctaatcactggcacacaaaaatgactaaaatactatccttgccctcacatatctcccaatcttgtgccagaaaggcacctaaacagaaacccccactataatgtggtatatgctgtgaaagaaatatgcacaggatgctacggtagaacaggtaaagggtatctgatctagtataccctgagatggctgtggggaaaaatagaacagaaattccggaggaagtattgactgaattcactcttaaagaatcagtgaaaaatcacctggggtaggtttgggaaaggaagagaatagaattctaggcagtagggacaacattagcaaatgcatgaagactaaaaacaataaaatatgtgctgataaccataagtagttcactattgctgaaaaagaaagtgacacttggaagaatagcaagaggcatcagggttgggattatgagacctagaaaaccatgtaaaggagtttgaactccatctcctaggcaatgcagaatcattgagtgcttataagtagcagagggatgtggttagacttgttatttagataaaccattccctatactttgttttctatatgtacatttgctatggtctgaatgtttgtgtctccccagatttcataggttgaaactaatccccaatgtgagaggattaagaggcagggtttaagggaggtgattaggttatgaggagtctgctctcattaatggcattagtgtcttcataaaagaagtttgaagaaggctttttgccacttccaccatatgaggacacatagaaggtgccatctatgaggaagcccccgaccccgcccaaacaccaaatctgctggagccttgatcttagactttccagcccccagaactgtgagcaataaatttctgttgtttataaattacccagtctaaggtactttgttggggcaatttgaatggactaatacagccttcctctaaaaaagtggcccatagctttcatcagattctaaaaggtatccatgacccaaaaggatcatggaccttggcatggagaataattctaaatatgaccatttatcagaagtatctgttcatatgttaaaatagtcagatgataggacataccccatgcctattgaatcagacttaggatgtgggcatagaaatctatatgttttttaaagctcctttagtggtgctgataggcatacaaattcaggagccattgatcaggaccaagagagctagatttcaactcttaactgccaaggattcatccacatagactctatctctttttgtttacttgcattatcaatgaccttttccctcgaatgaggtcttaacttcatgtgagaatgtgtccttacttttgaaaactacagtaggataatcattaaattgctggataaggcaaccccaattttcttgcaggagccatggcccacctttagtaatttagttgggtgattcccttagataatctgtgatccaggctaactcaaaaaggtaattggcttttgcatggttatttaaggagcggttttgtagcattcatgtaggatgcataaggtattcacctaaataacatgaagacagttgtttccataattaaagattaagtgatatattgcagagttgttgcctttaagcagtttgaggctttatttttatagaaactacaagatgatgggcgaggaaaaaagggggcctcaaaataaagtatttagacaatgttatgcaaaaaatagctaaaggaatttgttcctgccaatttctacaagctataaataaagagttagggagtgaaaaggaataaaccaacatgtaatgcttctgagatatgcttggcttaaagatacttttttcttcaaaaaggttggaaacagattggccatagatataatattcagtgaaaaatctgaatgttctctttcttacctaaggaagggggtggaatatcatacccatttgttgggaaaactaggtcagattatatccattcatagatgctctaagtcagagctagaccaagggtttgggatcatgaagaataacaaaacatattagtcacccgatacagataatttcccatatctgtcaaaaatgcaaaatgtctatcactcttagccctctcctcccctcccatcttcagaagcagttttgcctatcatgaccatcgtctctacgtggttaaattgtattattgataatgtcaacacactggttgatcctttgactcaaggtgacttggtttggaaatgggttcattttcccactgagaatcttcaggccaattaattcaaccttatttggaaactacaggtaattaattattttttgttaaccttgagcactcccacaagataggatagcaaaaaataaaagatttggtgggatttcacgtgctatatttagtggaaatgtcatataaactggaggatgaaatcttcctacaaaatcaaaatccaatatatggaaagactgctaagaaataggactgtcttacttagtaagagacaggccgtttctgctgtaactttctatgattttaagcatttaggaaggcattccttaccccagtattagtagaatctaaggagtccctggataacctttagggagtccatgaaactctttaatgatgtcatattatgaaatgtcaaatattgtgtgcatgtgcttatgtgtatccctgggccagaagtcataactttaactgaatcttaaagaagtgtgggacccaacaagcttgaaaaccaattgctctagcatttccacagtaatgcaaagcctactttcgtaagtcctgaatgtctccctatggtatagccaatctacttttaggaaaggtgctgtgttgtcttcttattggctaatatttgttttcaaaaatgcatttcgtttattgtctgtgaatttgcatattcataacacatcttaaattgaagtataacatagtaaagtgcataaagagaggttaagtatacaattccttgagttatgacagttatatgtacacttgtaaccacctcccaaatcaagatataaaagatttaaattaccctaggcacttctctcataatgctttagttatttctcacctccttcccaatgcagagacaaccactgttcttattattatcatcacaaattatttttgccaatttcaaaacttcataacagtattttcttaatggcatcttctaatgaacttttcactgaaagaaacttttcatcaaaattgtttatttttatttttattcctttatttcatatttttttttatgattactttttgtttgtcctaagaaatgttttcttactccaaggtcataaaaatagtctccaaccttttcttaaataccactgcttttgatatgttgatcttgtatagtaagaccttcatatattcacttatttctattagttttttgtggattctttggggtttctaaatacttctaagtagaattgaaatagctttacttcatccttttcaatctttatgactttaattttttattattggtattactgcactggctgggattccagtacaatgttgaatagaaatggtgagagtggactttgaactgtttctgatcttagagggaaagtactcaatgattcaccattgattataatgttaactgtagggttaacatgttgagaaagttaatcaggttgataaagtccccttctgtttctattttactgagactatttataataaacagtggttgaattttgttaatgctttttctgtattttttgaaatgatcttattatttttctctttgctaaaaatgtgagtaaccttgagttgactttctgtgtaaatcaaccttgtgtcccaggaaaaaactccaattgatcatgatgtgttatcctttttatacattgctgtattcaatatgctaatatatttattttttgtgtctatttcatgagggatatcagtatgtaattgttttttcttgttatatctttgttggttttattaatcaacattatgctaacttcatacaatatattggaacatgctccctccttttattttctggaagggttcatgtaacactgaaattatttcatttttaaacatttgatataattcattaaaaatccaattgttccttgatattttctaaagaaaaggtcattgttacaaattcaaaaccttaataaatataaggccatttatattttctgtttctttttgtgttggttttggtaaatttgtatttttcaaaaagtttttcactttaacttgttaaatttattggtattaatttttcataatgttctctttttggtctttaagagttaatttaatttaatgagtgtacattattttttaaaataaaaaagaaaaacttgaaaatgcaaattaacaaccacatccccatttgccccaatacgctgtagaccccaccacaaacacaatacagatgagtgaatcaacagtaacgtgctcagagctggggcatgtgactgttatgaccgagttccatattattgtctacacctaatgcaatggtgcaatagagatccatgtgatgtggcacttcaccatggaaggttttgcagattgctgaatcgagacaggcagtggaatataatagaaagcacactcggaaatagattggttgattcgtagatttactagtaattattatgtgaccagggacaatctcttaacttccttatgcctcgtggtgcagcaaaatatcacaaatcaccactaatgaacttactgatataaccaaacaccacttgttccccaaaaacctatggaaataaaaataaataaataaataaataaataaaccaaaatacctccatattgaccagataaggaaactgaggcataaggaagttaagaggttgtctctttttggtcttctaataccttctaatacctgtatagtgatgttctctcttttgttcctcatattggtcatttgtgtaattaaggtctgctagagatgaaatttctcaactattgtctgtctgaaaatattcttgccattcttttgaaggatttttttttattagactttaagttctagggtacatgtgcacaacgtgcaggtttgttacatatgtatacatgtgccatgttggtgtgctgcacccattaactcgtcatttagcattagatatatctcctaatgctatccctctcccctccccccaccccatgacaggtccccgtgtgtgatgttccctttcctgtgtccaagtgttctcattgttcaattcccacctatgagtgagaacatgtggtgtttggtttttttgtccctgagatagtttgctgagaatgatggtttccagcttcatccatgttcctacaaaggacatgaactcatcattttttatagctgcatagtattccatggtgtatatgtgccacattttcttaatccagtctatcattgatggacatttgggttggttccaagtctttgctattgtgaatagtgctgcaataaacatacatgtgtatatgtctttatagcagcatgatttataatcctttaggtatatacccagtaatgggatggctgggtcaaatggtatttctagttctagatccttgaggaattgccacattgtcttccacaatggttgaactagtttacagtcccaccaacagtgtaaaagtgttcctatttctccacatcctctccagcacctgttgtttcctgactttttaatgatcgccattctaagtggtgtgagatggtatctcattttggttttgatttgcatttctctgatggccagtgatgatgaacattttttcatgtgtctgttggctgcataaatgtcttcttttgagaagtgtctcttcatatcctttttgaaggatatttttagagggcactttttatctttgattctcaataacttgactattttgtgctcaggtatatttttcttcatatttatcctgtttggaattgattgagtttcttggatttgtgagttaatctaaagattacatccatttttgaaaagttctcagccattgtgtcttcaaatatttttttctcccctattcactctaacctcttttttggaggactctaattatttaaagttagactgttagatattatccttctcttgtggaagctctctttgtgttttaaatgattttttctttttacatttcagtttggataatttttattgatatgtctttaagttcactgatttttttttttttttttttttttttttgagacagagtcttgctctgttgcctgggctgtagtgcagtggcacgatccggttcactgcaagatccgcctcctgggttcacatcattctcctgcctcagcctcccaagtagctgggactacaagtgcccgccaccacgcccagttaattttttgtatttttagtagagacagggtttcactgtgttagccaggatggtcttgatctcctgacctcgtgattcgcccgcctcagcctcccgaagtgcttggattacagacaagttcactgattctttagtctgctacattcagtctgttgttaaacccatcaaacaaattatttctgatatttctatagaatttccatttagttcttttctatcttttcatgtttctgcttaaactcctcagcttttcaataatgttgtgcattgttctcactagattatttaacatatttataacaattatcttaaagttattttctgctaattccaacagttgggttgtatgtggatctcctctattaattttttcctctttatcataggtatatttttctgtttctttgtatgtcttgtaattttgtattatatactagaaattgtgtataaaaatgatagttatgactgcagtaatactgtgctcagaaaatatcatgcttcttcttctgttaggctgctggtgagagatctcaatctgatttgtagttgagcagggtctgggcttcattgcagctttagttagattctgttcaccactggcttcaaatatttgaggatggggttgagactttcccttcagtgggctttggatctcagcactaccaccaccagactctaaaggtctctatagcttacagttcagcttccagaattccaagtaccatgaaaatgctctgtgctttatagttcagctgccagttttttggggaacagagaaatttcctttgcttttcatctctacccctaggtctccttaccttgggagatctatttctccccaggctgttacacactgctcccagccttcagcaagacattgcattgcacttgatgacagcacctcagggcatctatctcagcaatcctgccccttccccagctttcattaagtcactactttgcatttgattaaggtcctgtgtaccttcaaaatagactctctcagccctcatgccttgctcccaggctttagggaattgctgacttatacttggtgaaggtcctgtgaacctcagggttatttttcttaacttccttgtccttgtccttagcctttgattggccagtgccatgtattcggcggaagttcaatatacctgggtggggacatcttttctgtgtgcttcagggaaatctttctcaactttcttgctcttcccctggtctttagtaggccaccgccttgcactgttatggtcctctgcatcttggaatggaggggatctttctcagtgttcttgccctgtcctcagtcattggtgggccactgcattttacccagtaaagatccagtgtgcctcaggcggatttctcttggacctcctatcctgcctctagcattgagtatcctgctacttccacttggggaatgccccatgggaaaaaattggcaggtgggtaaagatcaatatttgactggattaccttggaatttgaatttctcatgccaacccactgatggccactaaaaatttgttagcagtttacttgatttctccttaccccactctataacggagtaacaccctagagttactaggaatgaaagcagtcataggacacttttctcctaggaatgcattgtgtcttcctaagatttggtttatttaaatttctttgcatcttctgctctctgctaggctttaagttgaccgcaatattgcagcctattgaacttgtactcattgtactcattataaggatgagagtgcaactcctgtaactttctacatcgtaaccaaaaatttggaagtcaattatttcatgcccaaagtcttcagagccagatcttctctaacgactttgaaaataatatgctttctactatcctccacatgctttctctggcaagtgcaatagaatcagatatgacccacacttcagtgttttgcactgaaactttttcattagggggaaggaagatgagattcaagagaactattattattattacttaaattttttctgggagtacctgctgttagccaagcagtcatcctgagccctatcaaactgaacctactaaatctttgtgttatgacaatgtctttcacacagatttagaccctcacttttctatctgccacttacttctggtggaaggtgtccattaggtccctttgtaagaaaaaggtttacttcatacccttttcagctagttaaatccctactcattttttaagatgtcagttaaatgcatatcttccatgaagtcagccccagcatatcttacagccttgctacactgctagtgtaatcatcaccattttctattgtgtacataatgctaggggaaatatgagacctccttcttaaaactgcccacagggtggggcgtggtggctcatgtctgtaatcccagcactttgggaggccaaggcaggcagatcacctgaggtcaggagttcaagactagcctggacaacatggcaaaatgctgtctctactaaaaacacaaaaattagtcgggcgtggtggcgcatgcctataatccctgctcctcagaaggctgaagcaggagaatcacttgaacctgggaagcacaggttgccgtgagctgagatggcaccaccattgcactccagcctgggcaacaagagtgaaactctgtctcaaacaacaacaacaacaacaacaacaacaacaacaacaacaacaacaacaaagtgctcacagattatctagaattgggtttccgtgacctgacaggttattatctcccttggagtaaggatgaggggctagactagcatcttccaaatcataggtcctatgagggtaagagaggtgggtttccctaagagaaaacgggctgctcttggcaggaaagggcactagctgccaagggggtgatatttaaaatgctttaattaaaacttagttgatatgaatgttaccagaagaaaaagacaattgagaggaatgcttaatttgtacgtgtttcaacctaaaaacaagacacaagcgacatggtacccaggaaaaattttccaacatccaataagatggctaataccagtaaattggtctctgcaaggaaatgatagccaactttttttctttcttaaccactgaggaccccttggttaatttcacttccctggaccccaatttatttcaaacactttggctgccaaactgcaattatcaaaaaaatattaaaccacagactcttagcaattatagctcagcattattttcccttctttttaactgcgtggcaattaacctggtggccaaccaaaaataaatatactaatttccttatttaaattctacatagctttttattggagaagtttagattttctactagtagactttatttttattttttgagacagagtctcgctctgtcgcccaggctggagtgcagtggcacgatctcggctcactgcaagctccgcctcccaggttcacgccattctcctgcctcagcctcccgagtagctgggactacaggtgcccgccaccacgcccagctaattttttgtatttttagtagagacggggtttcaccgtgttagccaggatggtctggatctcctgacctcgtgatccgcccgcctccgcctcccaaagtgctgggattacaggtgtgagccaccgtgcccggctagactttataatatattgaaatatattgtgaatatgcagtgaagatctttaaaatagttacaacatttgacctgccaatttcatgtttattatttgtcctaaaacagtggtcagggatatgaacaaagatttatcttgaggaatatttaccactgcattcattacattaaactgttgtttaaatgtttaccatacaatagtaagaaattacaaaacacctaaatttccaagagtagaagttgagtgaaaacagtatgaaatataggaaatggccagacaatggagcactatgcagcattaacatttgattagataagatgatttaatgacatggaaatatgttctctatacattaagtttaaaaaaaatgttctaaaatgacatctttggggagcagccaaaatagcctccaagtctccttctttatagcttaacatttttttctgctctaagatgggatgctacgatcctgtctgattaaagacacattttaggcctgttttaccagcatatttggtcaaggaaaccaagttatttgcagtttagtttggaacagaaattcaaacttggcaaataatttgcatattgacagaagcatgttttctttctttataaaatgtatgtcaccaagaaagaaacaataattggcacctaaacttcatttcagtactgagctacctcaattacattccactaagtagaatgaaaaacaggccatccctcaaaggcagacaaaaaaaaaaaattgtgacttagcacaatttctgctgatggatttctgattcctgaatgttatgacgatttcatgttaagaggcattaaaacatgattataattgaaaacaagagggcctgtgacactagagggaccacggtttaatttggattagtattaaggtcctgaacattaaactaagaatatttcctcttcaacaggttaaaataaactattttggcaaaatattaactattactaatgggtaaaaactacatattgcttgtaccaggtgctattttaagaactttacatttattaactcatttaatcctcaggagaactctataaagtatagactactacttacctgaaaaaactgaggcacagagagatcaggtaatttcaatgaggtcacaaaactgtgaagacaaagagtcaagattcgatcccaggtggttgggctccaaagactgtaattttaacctgtaaacttggacagtttcatctgcatgaggccaaaagctaataaaaaccttgaatccactctagtaggtgagtacctccactgtatcctctaaagcatgtttcagcctagaggagtacccaacctagtctaatttctcccccaatattttgagttcctgcataccacagaggctgcacaaagtcaggggaggctaacgtaggatgacgcaggcatctacacataacttgtcattttctcatctcatgagtggactcagtggaaatgctcagaccataaatcaacaccatctgtaattgaggtttgctcaaggtatctttgcatgctatagcattcattgaaatatctgtgaggtaggttagaaccaaatttaacagttacttctccaactagccttctcatttgttctccaacttgggaatgattctatcattagacacaccctggggccagattttacaagtggcactatcataacagtgtgccagcttaggacctgagttcaccacattcctttctgagcctactctgatgatttgccttggactggccttgtccaagctcaccttgacatctgccttgttcagtgctcagtaggcagttgttgtttagaaagtctttgtaagtaactattttaaagtcaccattttacagatggacaaagtgaaatacagaacacaaaatgtgattgatgtcataaagcaaatcaatgctcccaaatgcaatttgccattcgctctcctgtaaatatgtgaaattggtgacttaatgttcttactgtaaaaatgcccaaagaaagagaatagaagaagagtaacagagttgggggagagctaccactggaatggaaggagcgagggaggaaaataggaaaggaggaaggagtattgcgagaacataaaaccttactacagtggccctgaatcatggagctgcaacacacctggagcacttataaattcttttgagaaatgccagtgtgacatacgcctcgcaagccagcaattcatgaactcgatgcagtagttgaaaccaaaggggtaatggccacagctgtcaggatccagatgctctggggctcggccctgccactttgtcccagcattcatgcgaaggaatgctgtgaactgggcatatcaccactgttcaccctggcctgcttccaacagcaccggctgcatctggcctggaagatggccatggctggcggccctatgttccccataaggttgggcactgggctgcagccaggctgcgagtgctggacctacatccagcacactctccgtccaacctcatctgcctgtctaccccagaacccccaaggaagcttggcctttcctggcacacagaatcctcctgagaactggcgtctttctgcagtcaacagaaaagatggaatgaaaaccacacagatgaaaagtcatgtcatttattaataatttcttttttttttcttctataaattggaaggaaaaagtctttggtgacactctctataaaacaatctatcttggatggcgaaacccagacataaagttacacaggtcagtgaagtaaatcaatatctatggctttgtattttctcacacgcgctctctcacacatacttgagggcttaattacgctaagtcattaatactctataacaaatgggaaaaacacttcagaaaagacctgtggtgacactacaaaaacattggcaacatattagaaaactctgtcccaagtgtacatcgtatacaaaataaggtatacttttgttttttgcgttacaatttgccacctaaaatagttccagtttttgatgtctttctttctgcccctcaacatatcctatacatattgttctctcaaaataagtacacaaggttcattacatggtaaccaggtcatttgcatagccctagttttagtaatagttacaaccgaaaggacagggatgtattcctgtaggagaagaacagaaaactattgcagaaatcaaatggcctgaggcctaaaaggcaaatcattacaaaaccagagtgactgaaaggctagcctgacttgattttaaacaagggtgagactgtgctatcctgagggctcagctttctcaaggtttgccttcttctcctagttgctgggccatgttaagttccaattctgggtagctcactgaggttcctgatataaaatgtattggaactctagaccagtgacaactacaatccctactaggtaaaactcatggagacaaaagcctttgatttttggaaagggcaaaaaggggagagatggttttgaggagtcaaatccatcatcacaattatggtgtaaataacagcttttttatccagaggttctgtacagcattattgaactgatgggagagaccactatcttagggtacttaatcccccaagcttttttttttttttaaagaaaaaaaaaaggggggccaggcgcagtggcttacacctgtaatctcagcactttgggaggcagaggcaggtggatcacctgaggtcaggagtttgagaccagcctggccaacatagcaaaaccctgtctctaataaatatacaaaaattagcccagtgtggtagcacatgcctgtaatcccaactactaagcagggtgaggcaggagaattgcttgaaccggggaggcggaggttgcagtgactgagctgagatcacaccaatgcattccagcctgggtgacagggcaagactctgtctcaaagaaaaaaaaaagacttggtgtcaaaggataaactaatctctttatgctgaagttcttataccaagtgagacaagtttagcacagtttgatattaatgcttatttgctgagaactcaactcaaaacaactttgtccctgtaagcatgcctgagaaaatgaggctgatagtgaaagaaatttcttggttaaatctggccaagaatgacaaaaccaactgaaaggttcttgtccatagtcgctgtaaaggggaactaggtaaatgaattcagcaactgcggtcctgatgtactggctgcatgttgattatattcacaagtaagaggcaggagcatttttatttgagagttcatggcaataactgctacttttaaatactggagatctcaagagacccaagggaacacaagacacttccaggtctgggaagtttgcttggcttttgcatccataattcagccttgtccagcaagaatctcattcagattccaacctagtaaggctgtcttccccctgatcctgccctttaaacaggtttgttcttaaatcaagtgccctgttttttttttttttaattaaaaaaaatagtatataggcctattcacattcattcatctcacccctgattaaagttcagtaacctttatgaaaggccaccagcataatactctttcaagtcaccaggtatttgagaaccaccaaaataaaggctaacatagcctactgtaatgaaaaccaaaagtcattctaaaagggaaattgaaggatgcaaccggattgatccttctttgagcaccatttgtcacaagaagaaattaaactgtaatgcacataagattccagtaacaagctttccctttttttttgaagcatctatctgaaagtgtgttgatacgaccaggtaggcccacctagctatgctatcttttgtggtatgactatcgtgattatttcatggatttttctctacagtctcaattttgagccattttgctagcttcaacaaaggtgatatgtattaatgtatttgtaagctttgatatttataacactttcatataaataaatacacagccagcttttaaaaaattacttttaagatcctgtgtcttaatgtggagctgggaaaagatgctgtgtggaaatccataagtggctgagtcctctttggaatttctgcaagcaattcattacgtggttggcactgtactctcagcccttggcttctctccaatgcagcacatgttagcccacttagggacccctagttatcattaaagttgaccaggagataattcctgacaccctacagagatggctatgatttgtcaacttgttgcaatgcaatacaactctttcctaactgaattaaaattacatattactgtcgagcttcactgatttgttaagcattgttctattcccagccttatattccaaatgggagaagaacacgctagctcacatcccaaagagatttgctcagagaatgacataaaatgaaactgtggagatttaaagtggatgaaaggtgtgttatatcctgttcttatttataattaccatttttcttcacataacacatgttgtttgtggaggatatgtgttgtgagcttggtgacaggtcaatctggcaaagcaggtccttgaatccacttgtgtgactgactggtacaattagggacattgctttgcaagccaatatgaccacctaagtttcaagttggttttggggtcattgaacaaaatatcgcatttattttttggtaaaggagaaacaagaataatttgccaatcctgaaaaaaataatttaaatacaaattcacaaaggccaaatgaataaagattaactgctaatcttttaacttgctgagaagtgcagcttaaatgacatgaaacctgtaagaccaaacattttatagaaaagacacaagtgcaagcaccatggacctaagaattatttttcaacaaatgcctaagagataatcacatctacttaggggaaaatgtcacatgtttgagaatggactatggatgggtccaattagatgagagaggtatttagggagctgttctgagtcatgaggctgaggagaaaatcctctctttaattgaatttcactgtctacgcacctctcaaaacaccatctggatatgtgggctctactccttgttctgcagctaggtagcctgttgagtcacttctctggacttccacaaacactttcactcctgtttacagcaccatccccgtgctatcattacaagctcctcttcctctcccagatgtctacaaagaaaggatgaggtaaagtccaatggacttacggtttccactgacctaagatggccacttgaaattatcagaacaaaattctctgatgaacttttcttctaaaacaaaactgaaaataaatggaaaagaaatatgaaatgtatgagagtttgagggagggactctaaagtgcttattgtttattcagcataatacatggtcaaactcaataatgtctttctcttccctgttttctctggcctcttccaagtagaagaaagcatttaatatcagaagtctccatttttcataacagagttagggatatgttttttttttcagtttatacttggagtttaacaataatcataagcccaagatagcattttcagggatagaaatgttctttttaacaagaagcacaactaaacttttccacagatttaaaaattaaaagtaaatgaaactatattcacatttgttgttgattattttgtttgccagattcttgctcaaaacaatgtttgaccaaaaatggcattagggtcccaatggcgagacatctcctcagttactttgcagcaatcctcttgttcattggtgtgaatttctaccttattacccctttttctttctcaaaagagaaactctgaaacttgagattctcacaaacattaaagagttcatcttgtaaataatctgttctccccaatatactcattattccttggcttctaaaccaaagcctcttcccagtgctacgcagacttaggtcaatggttgaatctataaccgtgcccccaacccctgcaagtattgggttactgttgtgggtctgtatttccatctcactaacatgctggtgggttatctggatagttctttgtgcaaactgaacatttcttaattatactagtgttttcttggtactaattccccccacccccccaatgaaaaacgattatcatatatatctatctcaaacatagagatttcagttagaactgcctacctggaagtcgtaatactttctttcatgcagcgacattttagagataaaagttcaagtggatttgaagattcgaagtggaaaacaatttgcactggcaaagttgaataatgaagttacaacttatgctcagttatttcttgataatgggtagagtgacttattgtgttttccacgaagtttgagcttttgaaactgcagggcaccctacatggccatgacaatgatgtctgtgggaaaaggaatagcagctttgaaatattcacaaccaacacaattttgattaaacaaagaactctggtttttaatagttttgatcattaaaaaagtttaaacctgcatagcaatcatttcaaaaataattatttaatgttccataattaaactgtacacaacctagtcttgggacacagaagccagtgaggtgagtttggagcagtctggtgcagtcccaggagccaggagttgagttctcattggcctttttttttttgtcattctgctcatctaagtttttggatagttggcacaatctggctctgctgatgagtggatctgcactgggaagagagagcagcttgacccccatcccttcttgcttcccctcccccactcagccggattcctcaaagtcgctcaatgtctcggtatttcttcctcaaaatagagacctggtctttaaagaggacggggtcgagcctcatctgagagtggatcagcggcatgtagccaaaccagctggcaaacgtattcatgcagctctgtcgctgggcaaagtggtcagggtcagcccaacgggaagcccgagaagtctagggagaaggagagaaacaaggataatgatgagagaagtgcaaggtgagatggaaacattgcagaaaatggagtcaggcaaatgagcaagcagcaaagcttggggtctggcccggccaccaagtctcaccatctatgcacctgctgaaaatgcaatcgctgatattggtttttcccaaggtatgctacgttcctcagtgttaaaaacacaaaaacaaagattcatgttgactttaattctctaaaatttattgactaattctctggtcagtccacgacttagcaactgaaactcgactactacagtgactcaatctaaaacctctctttgcacttgggaccaagtactaagattaaagatgtgtttctgctttcaaagagttttctaaatccttcctgtttatgtagttgatttagaaatacccaccaacttttagaagtctatctttctctctatccatcacttccttccttctactatctctttacctttataagggtcctactaaatcctttgttaaaaattcacatatatagttgaagaagaacaaaatagtgccttttacatgtcactcaaggctagtgttacgcagcatctaaaactccgttttctcttctgtagcctccccattgacgtgactccatgaggatgagaaggtgagattcagtggtatatagagcatgttgctgtatgactaactttatactaaaatctcaaaattctgttcttctcttaacccaagaattgttggctttcctgcttgactaaaacccccaaaggttactttttaaagggcaatcagccctccaaagaatcactgctcacccagaataaagattaactctcgacaaatagaaaagatggctaccatgtttttagctctctgtgttgcccctaaagttggttaaatatttttagatcatgcaaatgattggcattgatttaaaaagaatgccttaatgactggagtgctgaaatttaaatagaatgactaagcacattgtctttcaatccctgtttttatgaaacatggaaaagatgggctgcccaattatgggggaacccccacaagcccatttatgtcaataggcaagtctttaatgatgtatatgtatgcacgtgtgttctgtgtatttgttgtactcacagttttagaaaaatactttcatgggaagatacattttagtgtgagaagcagtaagagtcacttcagaatcatagtgtcaacatgctcgaaaataacattgaagataaacacaaatgtcaagttacctctgaacagcagaataacaaacaaaacactatttgtaaagtgttttcatggagttcatttgaatctcaccacaatctggtgaagtatctacccaggtaataacatccccattttatagctgaggaagcaagtttaagaaagttagagttatttgttcaaggctagagaggggcagaactcaagcttcattcttcagcctttatatgaggggaactctacttgataaatcagagaaagatatcaaatggagctgactggttgagttcatatcagagtagacaatcccaaatgtaacttgttttgaccctaaatggatatgagtttgtgggccatttttttttcttttttttaaaggcagagtctcactctgtcacgcaggctggagtgcggtggcatgatcttggctcactgcaacctccaccacatgggttcaagtgattcttgtgtctcagcctcccaagtatctgggattacaggtgcacaccaccatgcatggctaatttttgtatttttagtagagatggggttttgccattttgcccaggctggtcctgaactcctgagctcaagcaatccacctgctctggcctcccaaaatgctgggattataggcatgagccactgtgcccggcctgtgggccatttttgattggcccactcattcccaaagggtgctgtacccaggcaaaatactcatatatgcaactagaaatactgtctagagtttacactcattcctattcaaaaaattttttttaaagttcagttgaatcattcaggtatcgttttgcttctagatgttaacatttattctgagtcaaccaacatctattagaaaagatgcctttcttatgtaataaaagcctaatcctagaggatgatatctatttactttaccggtcatacaaacattcaataaattaatgtgtatgatggaaagaagggggcaaatatagtacctgaatacacctagttagacctaaggttaaatttagatttttttgttaaagatgtatgaattactagaaatactgtttggtagaattaggctaatctatgaaaatagcacaaatccaccccctaagaggccttgtatgactagaattccccacttagtgagtgttctgaagaactctgagtaaaaaaatatttttaaaatgtcatgtccttaaatgagataatatacagtcatgcaccacataatgacatttcaatcaatgttggatcacatagatgactattgtcccatatactgtaataccatatttttattgtaccttttctgtatttagaaatgtttagatacacaaatatttatcactgtgttacaactgcctacagtattcagtacagtgacatgctatatatgttatagcctaggagcaataggctatagtaggctgtaccatatagggctgtgtaagtacacttgataatgtttggataatgacaagatcaccaaatgatgcatttctcagaatgtatcctcattcttaagagataaataaaaaatataaataaaaatgtttgggcacataatagacaatacatcttgcttgaattcgaatattctctcagccttaaaaatttttacaaatcctcttatctgttctttctgtaattagaaggaaacagaattttctgccagactctttgctaaggacagctctttcatcataaccaatacctagaacagtgcctggtaacatgctcactaagtactaaataactttttataaactttaaattctttataaactttaaatttttgcttactaaatttagtgaatgaaaaactatcagcttaacatgaggcctagctaagatttcctttgcaaaagctagatttgtatatgttttccaatgcctgtgagaacaaggcacatgcaaagcccctcaaaattgaactaatataaccatgttaaagtatgttcattcagattaacctcaatcctgttggatgctccatgatttaacgtgagtgaatcttaatgctctttcttaaggttttttgtttcttttttctttttctttttttttgagacagagccttgttctgtcacccagcctgaagtgcagtggcatgatctcaacccactgcaacctctgccttccagtttcaagcaattctcgtgcctcagccacccgagtaagctgggattacaagcgtgcaccactatgaccagctaattttttgtatttttagtagagatggggtttcgacatgttggcaaggctggtctcaaactcctggcctcaagtgatctgcctgcctcggcctcccaaaatgctgggattatcagtatgagccactgtgcctggctaagatttttgatttcttacatatagtaggggctctgctcaagatgaataaagatagatgaaattcggcatatccaggtggacctgataccaagatggtggggtgtacaaggacaagcagtgaagtccacagaccctgggattcaattcccaattctgtctctaacttactgggcaacttgtggcaatatgcttaaattcactaggtcctagttttcttacttataaaaagaaaatgttggattctatttccttgaaaatacctttaatactaaaattgtataactcaacacaatattttacttcacttttataaaagctttcaaacatattatttcaaccctgtaaggtagatttcaccatttccatgttaaagatgagccaactgagtttcagaaggttactgacttgcctgtattttaaatcctgattctagaactgaaaattaaatattgtgattcctgttatgtcaccaagacacaattcaactcaactgcaagcaccagaaaactgtgttaaagagagtatggtttgctagacattaaataaggtacctacaatcaactttcataagttatttgtagggctttaattctgctgagggctgaatgtttgtgccccctaatatttatatgttgaagcttaattcttaatgtgatgatatttgcaggtgaggtctctgtgggatgattaggtcatgagggtggagtcctcacaaatgggagcagtgctcttataaaaaggaccctagagaactctcttgcccttctttctgccatgtgaagacacaatgagcagagggctatctatgaatcaggaaacagtctcttgtcaggcaccaaatctgctggtgccttgatctgggactctccagcctctagaactatgaaaaataaatgtctgttatttaagtcacccagtcaatggtatttttgtcatagcagcccaaatggactaagacaaactctaaagacatatctttctcatgtcaccttaaagattataggagagctttacatccttggcataaagatactcttaacttgtgtcttcctaattatccctgcaccaatcatacactcttttctagctttcagatgtagttcattcctggtttctcctcattatatgctcctgggtggaacagctagaggaacgtgagtcctcattacctggggctgaaccaccagtgagtgaagcaagggaagagggctcttctatacttacctgtcccatcattgtctccttatactgcttcttctgggtcactttgattggaggcaattttgtcacagcagacaccaggaagttcatgagaatgtcctcacaattggccaattggtccaccatgttcttcaggctggctggcaggtaatgggagtataggtagtgataatatctgtaaaaatcaaagatgggtttcacagggggccattatcacatgatgacaagtggacttctgagacagaaaacacatacccattctttgaatccctaaacatgtcatgaatggtaatgataatgatgatgatgatgacgataactatcacttctatggtacttgttatataccagatattgttctaaagtgttttacaagaaatgcttcatttagtcttcataaggagcctacaaggcaggttctattattactcccattttacagatgaggaaacaaggcacagagatacagacatacagacattgcttgtccagtctaactctaacatcagacaggtgagttagaaagaagaactaaataattagatggcaagataagttatttacacatgatctatatattataaagctgcttaacaattttaatcattggcttaatcagaactgtatttaatattatcccttgactctgagtccaacaatagactgttctatatttgtgccctataaaccatatatatttcaatcctgttagagcaaaatctgaattaatggggtggtcaatcgtaacagaaaacccataattaatttgaattatttctcatcctactgtttttaaaatgtatttatatacatatagcatatatttataggaaaaatcatttgagtgaatcaaattcttagagtggtggtggcagaagcaataggaacaatgaactttcaagaagtgaaatcttgagaccaagaatcagtcagcctaaatgtttatgccttgagcatttccaagctatccctgagatagcaaaattccctattctttactaaaaagactaaggcaagattggtgtgttcactaatgatagaagagcaggtattttgttactggttgagtggggaatgttagctatctaccctcactagtttggcaatcttactccagtcccctggctttaaagaccaaatatatgcaaacaactgccaaatttgtatctccacccctgagctttttccatatatccttttggatgtcttaacatgtccaagactgaacctatatattttccctcatacttgttccatctgtagttttcctcatctctgttgatcagccctctaatcttccagtgtttcaggtcaaaagacttggagtcatcaaactctacatccagactctctaggcatcatgctaaagcatcttcaaaataatctgatcactacttaccatggccaccattcacttcctggtcccaggatcccaccatctcttgcctagataatgtcaatcacttcctaatagggcttctgcttcaactctgggtctgttatagcctcttctcaacatagaatccacagtggatgcataaaagaaaagccggatttctcctccctgttcaaaccctgtcctcctcccctgtcacttagagaaaaagtcaagtcttcatgatggacatcaaggtcctgcaggatttatcactgtgttaaaactgcctacagtattcggtacagtgacatgctgtacatgtcacaccctgttcaaaccctgccctcctcccatatcacttagagaaaaagtcaagtcctcatgatggacatcaaggtcgtgcatccatgccccctgacttttctgacttcctgtcacccattccacccagtcacagtggtctcctcgatggttctccagtattctgcctcagggcatttattctcgctgttctcctgccacaacactcttggtgcacatgtcctcttgacttcctgtccttcaagtctctgctcaaatctcacctgtgcaatcagaatcaccctggacacccccaatctgccccatctccaccttcagcacccttgatccttttctacactttgtctgttatatcacttatctccttaataaactatggaattattatgtagacagtctttctttgttagaatataagacctgcattggcaaggaattttttctgctttactcagtgatgaatcccaagcacctagaacagtgcccttgggtgctgacttaggtatttacttttgttgttgttattctaaatattcagttacctaatatgccctgagagtattttcacacttcagaccaactgaaaatgttactctaccataatttctggaaatgaaacatgccaagaggtttcactggtttcaaaaacacacatttgacacatcagcaaaacttaagcggggatacagactaattttcctcaatgctgttaacaagatttggccttagttcctatttatgcagcagccaatataaaaagctatgtaaagtctgtaagagacatgtccagattcctcacttgtggtaaatagcagctcctgtcaacaccatggagtagtcgttcgtccactttgatgtgtatccccaccgctccttagagttatcccagaagtggctgcgcgcggggtaccccacaatcctctcagggaagctctgccacactgtgaaggcgaaatccacctgcaggcagaacacaagccaaacaagcaatcaacagtgttaacaaatgtcaacaaaacattaccttctccccactaattcataatgcaaaatccggggactgtggcgaaacattaattctatgtattcatcagcaaattaaactgactgcttgacattttgccccataattatgcacattttaatgttttctgttaaagaaacttcagagtagtatggaaatgaaaggaagaaaaaaatttgctgatatgccctttaaaaatccagtctgttcaagctaaaacataagttgaaaaagcttcttttcccccttcctcaaaggtgcacgtgccttgattcacgtgagacacaaacacatctgttttataaatgagaaatttcccatgtatatccaaagaatgaatatacaacatatatcatacccagcatatatcaaagccaaagtgcctaaaataaaagcaccctcttaagagtaagagaaataactttaaaaaaaaaacaccacaagttctaacaggaatacagagcaggtatcataaagaaaacataattcaggcttcttaggtttgaagatgcacagtttaagagacactagaagaaagcatcaacagtgaaaatcactaagaataagtggggacaagaacaactgaagccacagaattattttaaaggaaatgcagctaaatgtctctccggtgcttatagtagcccaaagcaggtgcttctgaacctgctataaaccagcacttatagttagcaagtgatctgttttcaaatgcataaactcacttctgatttctatgatcatttgatgaatggtaaatcaaaataataaacagaaaataaaaataacaaaaatagtgacagcaaacaatcatataatgctcataattgtgaaatgttataatacaacaggtgcagctataggtgcttatccattttaactcattccatcctcacaatacccctgtaaggcaggggcttttacattcttcagtttacagaaagggaaactaagatataagttcaagtaatttgctgagctaataagtggcagagccaagattcaaactcaggcagtctggtttcaaatgtgctacgtactttatcaaaacttctcttttggctctgttactccagtgttaaaagcaatttgtctcttatacacgctatgattcacctcgttatctttgccgtatctcttctggataagcaatacaaatggaaatttcatctgtttcgcaaatattttgagtcctggcactgtgatggtagctgggggacggagggatgctgctaggtccaggtcctgccctctcagaggttccaaagcaggacctgtgatggttaattgtatgtgtcaatgtgagtataccatgaagtgcccagattaaagatgatttctgggtgtgtctgtgagggtgtttctggatgagactaacattggaatccacgggttcagtaaagcagactgccctcgccagtgcagatgggcaatatccagtcagttcagggcctgaatacaaaacaaaggtgaaggaaggaggaattcctcccctttttctttttgcctgccggctgagctgggacatcgaacttctattgcccttggactgggatttacatcattggctccctggttctcaggctgtaggactctgtctagaattacaccagtagccttcctgggtctgtagcctgcagacggcagatcatgggatttctcagcccccaggattatgtgagccaattactcataataaatctctctctcagtgtatgtatgtatgtatgtatgtatgtgcatgtgtgtaggtatatatatgtgtgtgtgtgtataaatatatatatatatatatatatatattatgttctattgattctgtttgcctgaaaaatcctaatacactgccctatcttaagataaggaagacttaaaaatatggcttgttccccaaaactataacatccacacggggccaggcacagtgtctcacgcctataatcccagcactttgggaggctgaggtgggcggatcacttgaggtcaggagtttgagaccagcttggccaacacggtgaaaccctgtctctactaaaaatatagaaattggctgggcgtggtgttgcacgcctgtaattccagctactggggaggctgaggcacgagaattgcttgaacccaggaggcggaggttgcggtgagccgagatggtgccactgccccctatcgtgggcggcagagtgagactccgtcaaaaaaaaaaaaaaaatccagagcggggaaaaaacccgggtggtggaaccgacattaagaaagcttggtagggagcacgttatctcaaagttaaaaggtagcaggggatggtgagcatctgctagaaaattgaaattaggttgtgattacctacaccttttcactagtggtcaatactaatggagacaactgatgggacagtatattatgcagcctgttgtcaaaggatcagcctggccgtcagcactctttggggttttctatcattctttgaaaaggaaacacatgcactagcaactactacagaacccaatggggtgttctcatcgcatgaatttcttactatcttaaggctgtttcaagtcatttcaaaggaactcaaaagtaaattcagataaaactatgattcttgtgatagctctaatttcatgcagattattaacacatcaaagaaggcaaaggtcagtttaaggccctttctctcaaaaaccaacatctgttttcttttgagcagcgtctgcagcaatccagataaatgtaaataactataaaccaactataatgccctttataggatgctgtttaaaaatccatccttaatgctgcagagagacatttaaacaatctgagatccttagagaggaaaagaaaagtgaaccaacatctattcacctaaaaaaagagaaaagagaaatccttgcccaggaccattttaggcaacacaaccactccactgatcagcaggcaaaagcaaaccagactgccagcctcttagatttacatatcattttcaacccacgttgacttctaattacttcacatacaacacatgttcctcccagcatgcattgagtggttggaattgctattctttgaaaagaaattcaccagcatgaggatgcatcacagcagttgaaagttatttcaccataggatagggaaaaacaatcctagagtgagactaattgccttgtgcccagggaaagatagaggatgaatcaatacttcaggtcataggatgatgattaaggtacatgctgtagttgtcttgaccatttgttgcaccatggcggtgtgctgctttgcctgtgtttgccctccaaaatccactatccactcttcttgtcctgccctgtgccctcagataatggacccctatggactgcatcacctggttgggttaggtcaatgggagtcaccggcaggaaaatcgaggcaggatagagagagaggtcagtgtatctcttctctgctccctctctcctttgccattagagttctggcagtagccacgtccttccatgatcatagcacttgtagagcagcctctccatcctagtgccatctctcagggcctttgaaagaaggagttccttctctaactccttcaggccaaagggaggagctgcttcctgctgtcattactcaccaggtgcctcattctctcttatggggtcttttaaccccatctacacctccctaaggaatccaaagttccttcatttgaatcatctgatttgaattcagtttgttgccaggactcagatggatatagcctggaactgtgtaactgaagtacctggcatggagaccaggacaaagaaatctctcaataaatacttgttgaatgaatgtgttccagcttcccttgcagaaagtggcagaaaaatgcaagccagagtgacctgtaccctgtattccatagctgtctttccctatgaatgttaagcttatcaacatcccttcctcctgccaacctacacatgacacaattggcggtgtgtccacctttaatccccaaagcatgcatccccccaccctggcccaaccactcattcaacaagtatttatagagcttcggctgcatagaaagcattttaacaaggtgaggtccaggacattttgtcctgggattatttaggttgccctttgacataacatctatgcaactctatctgatggcaccttgaaagcatctatggaattttttttttttttttgagatggagtctcgctctgtcacccaggctggagtgcaatggtacgatgtccgctcactgtaacctctgcctcttaggttcaagcgattctcctgcctcagcttcccgagtagctgagaatacaggcacctggaccacgcctggctaatttttgtatttttagtagagataaggtttcaccatattggccaggctggtctcgaactcctgaccttgtggtctgcccgcctcagcctcccaaagtgctgggattacaggcgtgagccaccgcgtcaggccacatctgtggaatttcaaggagacactgagttcacctaggccaacattgagtcttggctctgtgggcagcaggccattagaactagattggtgtccaggaaaatgcaggttacactgatgtttacattaaaaggaaaatgattgtgaacaaaaaggaaaaaagacagggagagggaggggaaaggtgtaagtagttacgtctccatgctttttagtagttgccattaataatgtatttctcatatactccatttttatatagctgtctttggtcctctgcatggtttaaaggaaggtttcagagatcaatactcattcgagttgtaaaaattggttttctaccatatctatctttcctcctctctctctcctccacgcgcattctttaggcaatcttatttttggcacaactacctgaacatctgaaataggaatctccatcacaaccttgaagtgaaaccgtttgctcttgtataggtgaaagaaaatgagctctttaaaccaagacagaaaagctgcctttagagctccacatagagtctcctaactgaggcaataggatacgtggagaggaatgggattatctcctccggaaagcatggtttcaacctaatgcagaacacgcaccctcccccttcccctcagttctgcgcaactgctcacaactgtgctgtttaaaaacaaaaaaggagggcaggcctgggaggaggggtgaggcccagttatgcaaatgaggagccaattagcagagacaacaaaggggagatgcccgcctcagagtgccaggtggcagcaaggtgctaacaggaatcgggctgattaaaaccagcgctgtaggaagttttgaaaaatgttttcaacttctgccaaggcacggctaaaagaagcattagcatcgtgcaacatgaggtgactgcctgaacagcccacctgctgctcctcaggcatgggttcttacctctgttgttgaaagcaccgtgtcctcgtcaaggctgagcacggcgtctgtgatgatgttgtcgtagggcagaaaacggctgctcataacctgggaggaagtagaagtaggcagtggggagggaatgagggaaagaggtaacttcagagtcttgttttcaggacaattctcccatcctcacctgcataaagaatgcgctactatcatgtcacccctcaacaccgaaggaatctcatttcccatcaatgcagatgtatttgttcaacaattattgggcacctactgtgtagcagacatcttgcttgtcaaagagggtacaaagataaatcagacatgttccctgtctttgaagagttcatggtctgtagaggagaccaagaagcagatgaccagtctttgcttgatacaaaaaatgccaggagaccacaggatggagcaactagctgtctggaagagcaggtgaaggcctcatagaagtgacatttaagcaggaccctgatgggcagaaagaattcaccaggtatagatagtaatgaagtattaaagacaagacttggcagatgcagaggcactgagcagagaacctgcatcctgacacccactcttcccaaccgaaagagtgaatggatggagaagtgattccaagtgtggacacaaaccacggggagagcagatcactgtagaaagtgctgcttttacaaattacaaacatttacaaattaaaatatgtattagcacagattagaaaaaatatatacacatatattagcagctacagcaatcaaaggtaatattaaagttacaaataacttcattaaaatgagaagtatactgatttaaagaaatatattaggccaggcgtggtggctcatgactgtaatcccagcattttgggaggctgaggtgggtggatcacttgaggccaggagttcaagaccagcctgaccaacatggtgaaaccctgactctactaaaaatacaaaaattagccaggtgtggtggtgcatgcctgtggtcctagctacttgggaggctgaggcaggagaatcacttgaacccgggaggcagaggttacagtgagctgagatggtgccacagcactccagcctgggtgacagagtgagactctgtctcaaaaacaaaaaaagagaagaagaagaagaagaaagaagaaggaggagaaggaggagaaggaggaggaggagaagaaggagaaggagaaggagaaggagaagaagaagaaaaaatattaaataatagcacatatgatccatggatttagaaaaattgtgaaggtggtgtatgcataaagtttgggcagttctggaataaggaaaggtggactacgtgtgcacacacagtggtgtgtgtgtgtgtgtgtgtgtgtgtgtggtgggggctttggagattatggcatcagctggaaaaattgagggtggagaggttaccctgtgatagtcacaacttaaacctttgtgttgaatgtaccatagaggaactaaccataagaatgctgacaccataagaataacattttttgaacatttactgtgtgccaggatatgttgcaagtccttcatatatatcatcgtgtttcatctttataacaaccccattttacagggagggaaactgagatacacaggttaagtatcttgcccaaaacggacccaggattttcccccagatggtgtgactctatagagcaccttggccaccgggctgtatctgaatggaaaggacctcaaaagtgaatttaggaacacatatgccaatcatatgctcatcaccttcttccagaagttatagtaaggatgatgacatcctctctgaattcacacctgccatcaactttgaagagacaaaggccagggaaagaagcaacttaacactgcagacaaagggaaagaggaaaagggaggtacctagccagctgccagagctgcagtctccccaaatctgagtacccctaggagccagctcatctgcaggcctcatctcaaactcggtttctttgccggcgaagctaccagagcacctaggactttaatgcatggacagtggccactctaactcatctccaagagctcaagggacatagctgtagcacacatggcttcaggggttgctcctacacatctgtcaactgggtcaagttttttgttgttgttgttttctttctcaggcttttgaaataaaacacaaagtgatcagcaacctcatagacacagtgctcagaattctcagcctgaagcaatcctcctgatactgtttacatgtccactgactaacgcagaaaccattagctgccagcttagcactgccctgacctttcccttgttaagcccacaggggaaaactgcaaagacaacgcctataaattcaaaacagaatttttcagccaaagcagcaaatatattgcttctaaattcatggagatagagattttaaaatggagaatgaggaagatgtagggcttcttcctcatcatctgcccaaccacaggtcttaaaaggatctgtttcctttttttctgaacctgtttcatcaacagaagtaaaaagcccataagccatccattttcgaattctcatgcagaaatgagaggcttttttcaaacacattgcctcagcgaccttcttaaatggattagcatgagagaaaccaatgtatttacaaagttaaacctgagtgaactgggttttccttgttagttcatttaagaaaggtttagctaccatgtgaaagcccaactcctttaaaacgaacaaacatgttggccaggtacagtggctcccgcctgtaaccccagcactttgggaggcctaggcggtggatcacctgagtttgggagttcgagaccagcctgactaacatggagaaaccccctctctactaaaaacacaaaattagccaggcttggtggcgcatgcctgtagttccagctactgaggaggctgaggcaggagaatcgcttgaacccaggaggcggagattgcagtgagccgatatcatgccattgcactccagcctggacaggcaacaagagcgaaactctgcctcaaaaaaaaaaaaaaaattaacaaacatgcctaggaaatgaccaagactcaagaagtttactgtcttgtagtgtgtgtgtgtggggtggggagggaggtacataagaaatgtacacaaataattatataaaacacaataatagttaagatttattgagtatccacagtgcgcccacacttctcagtacatttatttatgtatctcatataatctgatctttttggctaccttattagttacatattatgactctttccatttattgaaagggggcatcgagacacagaggattagcaacttgctttaagtcacacaaaagtaattttgactttagagcccataatacaaatcataagattatgatgcctcccagaagaggagctaacatttattgaacccttggtgcatgtataatatgcataggactaagcacctgatatggaatggtcttatttaaccctcaaaatgggcccatgtcatagcccaggttttctagaatactgagcctgaagcaagacttaagtgcaaacgcttcactctgaggtgcaatcccagggcactgagagtcagggaaaagacataggaagaacccagcccactggattcagtgcccaaggtggaggcaaggactgaacaaatgccaggggcctgaatatagatgcagctgggaggatctgaggcatcttgtaagagacatctgataaagcccacgagaaaggtactattattatcaccaccattttataaagaaagaaacggggagtttcttttcactgagaatgaaaatataaaatcaatcagtgagtcagagcatgaaaatgctatactacctaaagaaatcagaatggctcccagacagactggattgtgtctgaatatcctgacatatccaaagaaagacattatccaccagaagcagagctggtctccttgacccatggaagcatacaaaacaaagaatcccaaagttcaacattaactgcctgcctctgagtactgttcatggcttcaggcattggaattggaacactgccattcctatgatgggctattctatgggggggatggatataagggcctgcatgaaactgtgcttatggtgagattgatttgtgagagaggcatgtgattattccaacatccaccttttctcattaaatgcttaccaagcagctctctaacaaacaggttgtttgactccagccttatgagagccatggctatatttgtcacattccccactgtgttccaagcctgttacaaggagctcagcacacagtaggcactcataaatggaactgaatagataatgcactgatcatcttgtccttgtgacagttacaattgcattatgtcaaaccatatgaaattgccacttttggtgagtcgatgatgatatcaaatggttcagcctaataaactgattttgtcattctggcgcaaaggtgtgagccactctcttatgacctgaccccttggggactgacaaggaaagttttttagatggcactgcttcaccaatctcaatttcatttagtagtgactatttccttcacaatgcgtaagatctataagtaacaagcagaagctagagaaaaaagagctagctgctctttagtagaagaaatttcaaggaggaggtagcatgcaaacgggggcttaaagaatatatgggaatgttgacaagcagagatgatgagttgaggggtggtcaagacttacaaatggcaaagtcaaaattagaggtaggaagagacacagcgcaattcagctaattataaatgatcaaatgtagtagggggcagggtctgtaggggaaagcaatgagagaaaagattggaaggctggctagggccaggttacacatggcctcaaatgttaattggaagcactagcaaatggagaaaaaggccgggagatgatcagaaagatagttcagctctaggcaaagtgaactggagaacagaagagaggccggctatgtagcactcatgagaatctttacaggcagatgccaaacaaaattaaggtgaaaatgtcctttttaaagtgaatgggagaaagaaacaccattctgatagacatagctcattcagattaatcagccaagcaaaccatcaccaccaccatcagctttatcttcatctttgtcatttacagaaagataactattgccagctcctgactttatttaatcctaacagcaaccctacaaggtatatattattgtttccactttgtagatgaggaaactgaggctcatagaggttaagtatacacacaaggtcacaaagctataaaagagttggtatcaagacccagatttccctgatttgaaagcctattgtggtcaaatctgagaatattctgagaaaagtacagttttagaaaaaataatccaggaacagggagaagatatctagggccaagacccaaagtgccccatggagaaaccaaggctccacagtggttccacatataggtccccttcgagtcttaccttgctctctccttcaatgacgacgacaggcacagcagtggcaggccagcggtgtttggctggtaggggcttgtcacaattccatagaactatgatctgaaagggatggggctcattagatggctggggtaggatgtatttatgtatgcctccaacccaaagcctcttctcagagacagaaagagaaagaggagctggaaatctcagcaagacaaaacggcagacatcaaaactgagttttaaagtgagtccattcccacacaacctcagaacattatcaccccaacaactggagagaggacagaaagagcaaacaaataaacaaacaaacaaacaaacaaaaccaactgtgtccgggaataggggaaagctgcaggaaaaagaattacggtggctggagcttaataaagtggtttcctaaattctgatatcttatgatggtgtgtgagataacaactctgatcaaattaaataaaaatgtatactgagcatctgaacatctgctctgaacttgcactacaccaggcaatgtgggagaaataaaaaaattcaagctagaactaagatgagctcatgttttgcatgctctagaatggttgctgattttatgtgactttataatttccaataaaggcatttagttcaaaaatgcatacttccttattgaattctttccttgtttgtaaaccttcttgtataaactaattcacaaatcagaaaaaccaccgttcaatatgggaggaacactgatttggaaaatattgttaccataggcataatcgtctgctcccaattttataattagtcatagttgctatgaaaagaaaagttgacacttcatgacaccaacaagtctgcttcttctattgaagcttagttgtctgggtcctcccagaggctttttggatgttactttatcattttgacatttaaaaacaaaatcatgtgcttgtatcttctttagagactatgttggtgtatgtatatatactttttaactctataccagtgctaaggtctctctgtaacccatcccttccctgtgcagatttcacttccaagaatttctaagtggatgaaaagggtgtaacgaggcaggatgaatgaaagggagtagcagggtatgatgttagagaagtcccggggagcctggggagcccgggggataacaggtaaggagggcggagtctctggtctggagctggagcaggcaggggcttctctgtcaacttcccgctcacctgggcacagtactgggacttggctgcagccacgagaagcttcaacactggctgggactgagagaccaggggggtcaccgcatggatgactgcagtgaatttggaggggggctttaaacctgaaataaaaaggagagtagagcctaatgaagcgctggaaagcaagacttagaaaattactcctccttgctccgctgcctcatgctggagcaaatgttccctcctggatgatttctcctttgcttcttatgtcctgacaggacagaaacaagatgaaaagctgctggttagctactgcctgagtctagagacctcaataaattccagatcaatgtccacttctaggttcttgctttgacatcctttgcccctcttggtgatgtttctgtgatgtccctttggctttttaggtacccagtgtccaaatacacacaacactcaccacccttcatgtgctgtctctcccatggtatttgcatgtgtctgatttttaattatgtaatgaaagggttctacctgactaatcgtatttcaaataactagctagtgggaaaaaaggtgaaaggaagagcatccagggcctgactgtctaggtctgaatcccagatctaccacttactggtcgggggaccttggaaagattacttaaccctctgtgtttccacagctgggaaacagacctgatagtaacagtgccaaatatggggttatcttgaaaattcagtaagtttgtctgggcacggtggctcacacgtgtgatcccagcaatttgggaggctgaggcgggcagatcacttgagaccagcagttcaagaccggcctggccaacatggtgaaattccgtcactactaaaaatacaaaaattagctgggcatggtggcatttgcctgtagtcccagttatcgggaggctgaagcaggagaattgcttgaactctgaagacagaggttgcagtgagccaagatggtgccgatggtgccactatactccagcctgggcaacatagcaagactccgtcttagaaaaaaaaaaaaaacttaatgcatacaaagcacttagaacaggacttaacaaatgacaagtactcaatatatgtcagcagctaccattatcatcaccctcaccaacattattattttggagaagaagcctccatattcccagaatctcttcttcgtgtagcagtgatatagctgagaaaaaaagtatgtgaggcagacttttgccagttgtgagctctgaagccctaggttaaaaaggatcatagatatgcaaaacaaccactgtcaccaaagagacagaagtgagatggcttccccccaaggagttttcccataagaactcactaagaaattagagacaggttaagagccttttaaaacttcattagtttagacccactaatttggcactttagtggcttaactgcgagcaacacagtgcagggacattcaagttacgctttgatactgatgggataaaggctagaatcagactatatgtgtattacaggattatacaaaggttttgtagagaaaattatatcatccagcagcactttaattgtatgttagaaagaagttaaccttcccaatatctagatacatattcaaagttttgccgagtaagaagaataagcgtgattgagggattgccttttaaacaggaacgacaagtcattgtctttaaattttcctgcaatagtttaagaagcatcatttatacacctctaatgtgctaactccaaaggaagatctaaatattgtacaagaaatatacagaaattcttgtcaaccagtgccttaatctgacaatttctaaattctgttacccaaatgtcaacaatatactgaattagagatggttcccataacaggtttggtttggattaaaaggtgctttgtcactggttgatgcttcaggccatgcatttctttaggtttcatctcatcagtttcaaactaaacatgtacaacttaaaagggtgagggtgttacggagaacaacggcactgaatggaaaatcttgtctttttgctgtatcagcttggaagatgctttcctgtcctaggctttctcaagtttagaactgtaactgatgggaaatgttcatgatgtttctaacatgagagcaactgggggtccaaatacataaatgtctaaggcaataacagtagccggtggtagagatttatccctccgccattcccttttccctactgtgattagactgaaaaccgcttgaaagcagagattgtatcttatttgactttttatttctagtacccagcaatacattagcatagcacatagaaggagcataataaaccttggaaaaatgaataaatttgtgcttgtcacacattcttagttatttctcctttcctcttattcagtttttctttggtaaggaatagagatattgggattgtgaaaaaaaaaattggggagagctctccattttatatatgatgaggcttaaaatgatagctaacccattgccatgttcaaaatgatccataatttggggagcctatttctcaaaaagaaataactctactaaatatgaagtagagctgcacagataagaagtttttctttttttccattttgcaatgctctgctctgtttttgaacttgatatgtcacttataacaaggctctagaaaaagcaatcttcaatgcagggtgttagatggaccccattagagtagaagaataaaggcctttagttctgtatgacatcttcagggtaaacaagggcaactccctggaggaaattcacttacctaaattagcatagtagtaaggaaaatctcccagataagatgaatactgtggtagtacgaacaatcctccaggatgtttgttccatattaaactgttacgtgatatgtgcttgaatattctgtcctgaataatctagaaaataaaacatagcacacagtgaggatgagatcctgatgatatttggaaaggatgatgctcaatccaaattcgaaagatggtggcagtcagagtagtgactctaccctccctcccactttaattctccggataaaaatgtctgcaagacagagagagtaatggagcaatgaaaaagagtgagagaaacatatgaattatagccaatcaaatttcctaattaaacttcagttaaaccataagttctatcttgtctttgtataataatgagtccatgctcattccaaaatagactgtgtggagcagttagtctttccctgatggttaaacttctaagaactaagataggttccaggcccctatcaagaagatctgttctcagagaacaagagaggtcaatgtagacctgtagatgctaaacggaaagcatattcaagacatgacacattctagaagctattgaggttttcagctgttcctttaattcaagaggtagatgtgtatacttgtcatatttcattttcctttcaaagtcaattggaggactttgggtgctggttactgaagtttttctatatttcatcttgaaaagtagtgagttaacaattgcttaaaacatcctacataataggacaagaaccatggcatatgaagactaataatagccaagctagttcattagtttctttggactttgggaccttgcagatcattaaattctacatttagagtcaaacatcctcccatcccgaatcatttgtcagttgaatgtgattagtccactttatagctttctctctgtgactttcaaactcttacaattataccatccactcattagaatatgatttggcaaataattaacttggtacagaattttatgttttcagcaattttttttacattaaaaaaaaaaaagaaaaaaatcctgccgtaagttttaagacatttaagacccaaatcaccattttccaggtctccatttaatgcaatgtgattttaagtacagactattttaaatggagttttattatttgctaaggttattaacaccctcatctcattccacatggtgactagataagtaataaagtgggctacatttatctttgcaaatcttatgtttattttcctaatgacagagaaggaagcaaggaggaaattcaaaagaactcaaatatcttagttcaatgatttctgcatcttatctttcacccagatcaaaactgctaattttatatggctggatagaggtttctaatttggtggagactttaggaacctagtgaaaatatttatttttactttttgtggtacaacagggatatgttaaaatgctgttgtcttggcattaattatgagaaaattgtcatagttgtgaaggactttttacatggttagcaatttcactttgtacaacatttattcctgctttttattatttgtactttccaaacgtactgtctatttatttcctttttatagtttctctttagatcctcctttttttgtttttttcttttcaaatttatgtaccttttaggatgtggtcacttaaataagtttggatatcaagatagaaaataaattgacaatagacagcattataaatcgaacctacagacaaatatcatggaactcacagctgtcacaaaatgggtcatcattcccatcaggtctttggatggtatgcttgtcattgtcatagactatctttttggttcggcatcacaacattgttatcttttaaaattcaaagatatgataataagatatagcactcttctgaaataacaacaagcattttatactgtcttccaacggatcttgacagaaagacataggacaggtacgaaagcagtagcaaatgttgaatttaacgtgggtcaagcaatttgccacctttgtgtattattttcctcatttgtaataaaacaataaaataccacattaattataacaacgtctcagaatttaagaatagctgcctaagttgttatacttaaggcttgatttttgcctttaaaaagaaactcactcctgtgttcgttttctaggcattggtttttccatttattacatagtggtaatagtatagatattacataatacagctatttttacatattaatagtattcatgattcattattcttaatgaccagtttagcaattttttccatgcaaagcaatgaacatatttacgaataaaattttccacatttaggattgattattcttcttcttctttttctttttttgtttttgtttttgtttttgtttttgagacagggtctcattcagttacgcaggctggagtgcagtggtgtggtcatggctctgtgcagcctcaaactcctgggctcaaaggatactcccgcctcagcctcctgagtagctgggaccacaggagagggtcaccacacccagctaattttttatttttattttttgtagagataaggtctcattatgttgctcaggctggactcaaactcctgagctcaagcaatcctttctccccggcctcccaaagtgttgggactacaggtgtgagccaccgctccagaccagaattgattctgtaggaccttgtcaaagggtataaatacttttaaggctattcattagtattgccaagtgtctttctaaaaggtttatatcaacttgccttctaaaagcataaagaaatatggaattcatttcaccatatagaaagatcatttttttccctctgcaattcttcctatcactaccctggatagctcccagaatcttttcatggcacttagtgcttagtctttattgtggtggaagaagacatcacattagaggttggatgcttctttggctataaacaaaatcaatacacacacacacatacacaaacagataatacaagactttttttgttatggtcctagatggccccctcgataaggacaatatttctaattgatgtgaattcaaagggaagaatgacaggctccttattttacttttatgtatcctctgttttccaaataatggacaattggttataggttaaagtcattctatgtagcccttcatcttttaaccagagcactgtagcctaagatacacgatgccaccatatgccacctcacttgaagccagatcaattgtctatttccattaccccattgatttttaaatatcattgtatgatagcatcagcaatactatggttcgtatgtgcatgattagataactgaggaggaaaatgaagcatacttcattaaaactccactaactatataccttcctagctaccactggctcttttcacatattatcataatctcaggcactttctttcactcatcttgattatgactaagctccaatgattcaatccttagtgcaggttattgtgcaatattctgacaaataatggaatccatgaaggagcactgtttttgcagtgttttttcattgtcctcattgttagttctcaattttcacaaaagtactgagctctacagagcctagtttgattaaatagctccttattaccaagatgcagcattagagaatttcaatcaaactggaaaaactaaaagaatcctagacagagttctgtacaatgaaacgtactaacaacctgaccctggcattgaagagaaaatgagatgtcctgttttcaactgagtctaagcactctacctacaactctagggctcataattgctgaagaccccataatcccattcccatggcttagaatataccaagcaaggagaaagacctagagtctgagtacagaacatccttagcccaggatcttcaactctatgctgtaactgtgagtaactatgaattattctcgtgccttagtagctccagcagtgactaaatgaagtatattatctaagttctaagccaagttcacatctttgatacgtgatacttaaattgttcttataaacacatttgctgtgttatttgtatctgtggatggcattttcttctatttcccctgattttttgattatgttgaattctggggtaatctgagttatgaagtattttgggaaactgggtagtacctgtcatgcaacttggttgagaggtcaaactgttacaatccaatcttggaactatataaagagatttgacagttgctataaattcgaatgaagtgtatggtttttagtgtttaaaaaaaccccaaaactgtgttgctaaaaaaaaataataataatacatggtttaaatacaaagggaaaaggccttttcaggttcagagatgaaaacagcttgatcttattttgatcctattctgatgaatgtaagacattcaactgttacaatagaaaaattgagaactgctaacttaataggtgagagaccatattcatgcaataaaccatatgcaaaagacatgtaattaatgagataccatctttcatctggcaaatcagcaaagtgatagatgtgtgtgttttaattatggatctgtaagactgacaagagcacagcaaaagagagtcacgcccagacagcttgtgagattctaggtggatataatgtttttggataataatttggcaaaatatattataagccttagaaatgcctaggctctttggctcattaaaatcacttcagggattccatcctaaagaaatagagatgtagtttaagatacatgtagaaagtcattgcttagataaagatatagttatctataaaaaataaaaagaacattaatagtaaataatggcatattggtttaagtaaatagaagttcacaataggatgcataatagagtaaaaaaaattaaaacactggaatgtgctctggatgtattagaggtaaacaactaataggatagaattgaaaggccagaaacaacccaaagatacataaaaacgtcatgagaaaacactgaagaaagaaatgtattggggctgggcatggtggctcatgcctgtaatcccagcactttgggaggccgaggcaggcagatcacttgaggtcaggggttggagagcagcctggccaacatggtgaaaccccatctccatggcgcatgcttgtaatcctagctacttgggaggctgaggcctcagaaatgcttgaacctgggaggtggaggttgcatgagctgagatggtgccactgtactccagcctgggggacagggtgagactctgtctcaaaaaaaaaaaaaaaaaaaaaaaaaaaaaaatcttaacatttggcatattatttgaaacggacttcaaattcaaggaatttatcctaaggaagtaatattgaatctgcacaataatttgaccttgagatgatttactgcaatgatgtacataaaggaaaaaagccagaaacaactggaatctacccaaattggggattaatttaataattagatgatatcataaatggaatatcatatagtcattaaatggagaaaaaatgtaataacatgagaaaatattaacattattaagcagaaaaacaggttacaatgcaagtatataaagactcctttttaaaattaaaagtacaacaaattttaaatttacatataaaaatgaatatatatgtttgtggggatatatatatcaatagtggttttacatgaatgaattattttatattttatgctttaagtgttttctattagtttctaaaatgaatgtatacttctttaataataactcctttaatcccaccaatttgggtagtcgaggcaggaggactgcctgagccaggagttcaagaccactctgggcaacataacgagaccttgtctccacaaaaaatgaaaaattagccaggcacagtagctcgcgcccatggtcccagctactcagaagactgaggtgggaggattgcttaaggtcattccagcctggtgacagagtgagatcctgtctaaaaaaaaaaaagaaaggcactctgcactccaaaaagggagaaacaataacattcaacattctttaagaagggcctaggaaggatcttagatggaggacaggattaaaaaagcaaagggtaactctattagctactgtgaacagaggtaacaactcaattgattttaattgaggagattgcttttggagggataaaagtttgcttgcaggaaggaagcccttggaagtcattatgatcctgtccccttcatgggaatgggcctgggtcttaaacagccccttttacccagttccaggatgaaaaaaatacacactatgcctaagagaacactgaccagagctcgccctagggtgggagcaggagcccaagctcagcatggggtggataaatgccctggtgtgcctggagcatgaccagcactggctctgatagtcaggatggcaagaaaacagcgatgtggaccaagtagggtgacttcagtttcttggtattactcagatttctcagtgtaggttccatattacattagcttttagagcagtcatcactcttccagagtgaattctccaaaaggaaggccacaatgcccccacctcattttgggacacctcagaatcacctcaacgaagatctctgctctcctttcttcaagcttgtaatgcatgcgtgtgcagtttcctgaatcttttcctagctctttgtgctacttcggtgtagcctcaggccaatgctatctgctctatttccaaaggttttaatcatctccatgcttcctttttctttttccgtcctgccttaaaaaaaaagcaacttgaggacgggcgcccatctgcctaaaagattttctgctttcacaaatttaacactttctgtgccacatgggtatgatcctgattctcctcttaacacaactttgccacattgacgctggttggctggcttgcctaagtcttgagaattctgctgtcccgcaatgccattggactgtggtgcccagaaaactactcatatttttggaatggtagaggatttgcccttacttggccattatatatatttttctttttttttttttttttttttgaggtggagttttgctcttgttgcccaggctggagtataatggtgcaatctcagctgactgcaacctccacctcccaggttcaagatattctcctgcctcagcctcccgagtagctgggattacaagcgtgtgccaccatgcctggctaattttttgtatttttagtagagacgaggtttcaccatgttggccaggtcttgaactcctgaactcaggtgatgcacctgcctcagcttctcaaagtgctgagattacaggagtgagccgctgtgccaagccattaaatatttttttctaaatgaactccagaaatatgtcttcgaaggatgccattgagtgtaaatgacaagacagtcatgacccacatatccctgaaatgatgtaagacagagtcaatctctgtgtcaataagtataatttctccccatgtaggttttcctttgtggagtttgtcaggaatgagagtattttcttggccatggcaaagcaggtaaaagaggttaaccaatatatccaagtacaggaatctggttttgccccactggaccaatcacacatccctaatagcaaaacagaaggctgagagaagtgtataaaggaccattattcaagcccaagagccaagtggtctcacttacctctagtgtagttaatacaatcttctcaactgaagaaaaataagcctcccacaagaattgtgtctgctgtctaagtgctaggattttatcctgatgaatagacctgattgtagaaggaatctgtaacacaaggtgaacacataggaattataactgtaaaacaaagagatgcacttgatcaaaataacccaactgggttaggcttttattcttcatagcatttggcttctagcatatagatctactaaaaatcatcaattcctaagttgaaatgaccttaagaagtgtcagctgcaaagagcacttactgggaatccaccccaatggcctttgatgtatgaaagttacagttcacctctaagattcagtagcaccttatcagttgcttaggttagtctatagtcacaattgctgtttccagaaatccttgaccttgcacatgaacaaccaaattttatagaggggtaactataggtcttggggaaaggccagaagactttatctcccaagcacttctatgattggtcaccccaggaactataaaatatctataaaaggactttttagagaatgtctatgagccttcccatccaatctgaagctagggtcagtcacttttatgtgcacataccttctacctcacctttgagcctttctgctccctatatctctctttctgccttcagcctttacccaagtctaactggatctctcaattgttcatatatgattagccatcactgctctcttccagggtatacaattttaaaggaaggacctatatcttgttatcctgctacacattttcaggttagcagagtggattttatatagtagttattaagaaataggaggtgaatataaccatctgaagccaccacagggacgtcattatttttaatggtagtataactgaatggtcaggcacaggggcacagaagtcagaaagatcaaggaaggagtgttgcctctagcagcatttactacctgtgctttcttgaatgagttagctgatttctcaaagactccacttctttacttataaagtggggataaagtactaaggttttaatgatgattatataagtgcttagcacagtgcctaaaacatggaaaacttaattaatgtaacatcactactattatcattattggtatcagggtgatgctattaaaagctggatcaattgcttaatgtttgcaagggaacctacttgggtctggagctctgaaatgtacttcctgagtctggtaagttttctgggcttgttccctattttcacctacagttcaaggtctatttcatttacggagtctatagtctttagggaagattccttgtgatttgcaattgcccttttgtgctcacctctttctgcatgcttgcctccataacatatgactaatccgacagatatgggagtctgagcaagaaggagaaatgctccgttagctgctttaataggaaagtcacccatggcatttgactaagactgtaacagagtttccattggaggggaaggaagtggtagcacattttttaattcagcactccccttaggaggagcaataaaatagcttcacagtaagaacagaaggaaaagctcacttggtttgacaatgtccaaaaccagatactaaatctgtgtcccaaagtgtatacctggatttgcaacactgaaaaaacagaggcaacatgtaaaggagaaatactggcaggcaaacattagcctgtaatcagagcccaaggtcaaatggaaataaaacattctttgagaaggtagacaaatcatttatatcatagaacctttatcagtgcaaggaaacttatttttagttactcactgagaaagttacctagatggccaaagaaagattagaaaaaaactatcctgttcaattttcataatcataccctcttctaaatgtcaagaggtaactgctaagagttatataggttggcatcactgttttatcgtagccacaaggaaacagtctattagaaaaatgcctaaggccgggcgcggtggctcagcctgtaatcccagcactttgggaggccgaggcaggcggatcacgagttcaggagttcaagaccggcctggccaatatggtgaaaccccatctctactaaaaatacaaaaattagctgggcatggtggtgtgcacctataggcccagctactcggaaggctgaggcagaagaattgcttgaactgggaggcagaagttgcagtgagctgagattgcaccgctgcactccagcctgggtgacagagcaagactgtcttaaaaaaaaaaaagaaaagaaaagaaaagaaaaatgcctaaagctgtcattgctatatagtctccagaaaattgagtctgctgtggttatgaaaggagaaaaggaatatcacagactcacctaccaatgctgttcccctctcttaaataacatgcatcttcatcttactacatcaagtgcaatgtattctaccggcttgtgatatgatacaagtgtctgacagcactctgcaaagtgctctggaagacaactccaattgattgaaaagacagagttccaagttttaatggcacttggctattggttattaatctgcttgtcctgagagacaggtatgggaaagtgataaattaattccaatttggctggattgttttggaagttgccgagctcaatgaagtcttaataaaaggtcatgtatggtagcaaaacaaatggaatgcaccagaatagatacaagaaagtcacattaagctctcttggtgacatgatgacaagaatatatgcaaataaaaacatcccagctgttctaaaacaggaaataaaaaattgtaacataacaaaaaaacatttcccagagcagacatttgggctgggtgccaactctttaaaaccattgttaatgatagtacacagttgctgctcaatatggaggcagctgtgcaaagacagactgaatatgagaggggaaaaacaccagcaagtctgggtgggtgggggtgacaaaaatcaaaatctttagagtcaagccaaaaagttgcttcagaaggtgaaatgcccatcaagtttggtgaaatggtagaaactggacaagtggctgggcgcgctggctcacgcctgtaatcccagcactttgggaggctgaggcaggtggatcacgaggtcaggagttcaagaccagcctggccaacatggtgaaacaccatctctactaaaaatacaaaaattagctgagtgtggtggcaggcacttgtaatcccagctactcgggaggctgaggcagaagaatcgcttaaacccgggaggtggaggttgcagtgagctgagatcatgccatggcactccagcttgagtgacagagcgagactccatctcaaaaaaaaaaaagaaagaaactgcacaaccacaattaagtatcctaaaatgcgctccataccaaagacaaactttcaatttgttcacatcaaattcatgggagcattggtatataaaaggaaaattatgggtggtgttttttattccctttatttctcaaatttcttttaatgatcatgtattatttttaaaataacatttgaaaaaggaagaaaaaaggctacatggacaagcacaacatgcatcactcttgtttggcttttcatgaataaatgattttagcatacactatctctgcatggggaaaactcttcctcagtgtttctgcaaggacttcttttccttaaggaatcacagtgggaaatcattggcataaaagtggccctttcacaaaaactccagacccctttctcaatgaacacctaagaaattaagttgtattcagggcagaataacttattcccccaaaaacagattctgtcacattcctcctttgtttctgagataatagggactatggagatcacaaactgagtgccagacagaagtaatgtttcaggagctgtggtcactttagtttgcttaacccatgggtctctcagttacagttagttcatttgttattttagggaaagtgctgtattacttcagcagtcagctagcagactgggcagcagcacagaaggagaatcaacaacagacttaagaggccaggcgcggtggctcacacctgtaattccagcactttgggaggctgagatgggtgaatcacctgaggttagaagttcgagaacagcatgaccaacatggtgaaatcccatctctactacaaatacaaaaattagccaggcgtggtggtgtgcacctgtattcccagctcctcgggaggctgaggcaggagaatcgcttgaacctgggaggcagaggttgcagtgagcagagatcacaccactgcactccagcctgggcgacagagtgagactccatctcaaaaaacacaaacacacacacatacacacacacagacttagaaactcaatttaatgaatatccaaaaactaaaagggcaaagacattaaaaaaaattctacaaatatttgtggtaattcaaagataaagtgtatggtacaacaaaagaaaaacattaaagttctagaattttaggagaaaagagcacggcaacttgtgttgatcctaaaatatgaatatacaaagggctttagaaatccttagtaatttaaaaaaaaataatacatgatcattcctgccctcagatttttctgagtatcgtatccccctccctaggcagctcttgagcaattcaaacttttattaggggctgctcatttaaatataaatcctaaagataacactcgctcagacacccagactggatcatttgaggaacgataacactaattacaagaacaagccctagagacctctctctttctgaaaattaatctgaaggcaagtgcagaaacagaggaaaagaatatgaaacagtagggtagaataaaaactctctggtaatatttctaaaaattctggttattgaaaggggtggagatccacttcttcttgaaaatcaaagctcccattctttacctgcaacttcttttcagaatatattctggggacctggggagattttgttggaaagtgaacaatgtcatattaaatgacttcatattcaccatgacacaggtaattttctcctgataagatttcttttatagagctgaccttttggattcatcttctttgaaagtttggacgggggcagcaataatctgctgatgtgttgaaggccacagccccttccttacctgtaataacaatctctcatcgcctatgacggcagcttggttccaattaatcacttcagagaatggcaactcccatccattgctgagcatcacagggacgcaggcagcctgagcaaaaaaggggacttcgtgaatgtgaggaaagcgacagcagaagctgttccaatcagaggtgaaatcagtacaaactcaatgactggcatttttgacactgcatgaatcctggactgcctaggccagaaggaaaggaagcttttatgagttatcaagtcacacgaaggttgtacgtatccagactagattttaatatttgcaagtcttgccctagaatgctaaaaccccatttctattctagtacatggtttggctgaccttacttccatagagacgactggccttgctggagaagtttttattgacgtaacaaaagctcgcaccaacaaaatctgagtatagaaccaaccttgaatataaacagtctggtcaacgtaactcccacaagtccacgtgcaaagtggtttaccccaatgtcatgagcaacaaagagcagaatgaagctcagcattcctaggcagcagttcgtggacttaaccagtatagagtgttcacatttcccttgctctgcaaacacccaaaccagaactttgttcctttcagtgtggagtgatctaaaccacagtcataccaatttatggtctgtgccgggaaataaacagccaagaaacactaggttaatgacaaaatactgattccaaataactcataatccaaatcagagaacaatttttctttatgcagcatcccaggaggctacaagaacattagtgatggcatgctatgcagaacacacacagagagcaacttggaaaagacattccagagaaggaagctcttctgttggagggcatgacagaatgatttgcagttaagatggcagagataagaagttatgaggcactgcagcaaaagcacagatttaggcatggtgcagggcaagaggaggaaagaacatagtagcaaagggtcaaggaatggaggatgagagaggttgagggcatgctttctctctgcaatcaaagaaggctggttgcaacttccaggtgggaaatgtggatgactgtctcaagaggacatttctgcagagtgaggttgatgagctgagaaactcccaccacaaaggctccagggctggagccaggacctctgaactgcagagccttggaagagctggatcatctgagtagtaccaccatgctggggatcattctcaaaattgaaaggaactgagagacaatgaagatgcaggcagaaaagacaattttgcttttagagagtaccacgaataaagggaaagtgtagggctgctttttagagtccagctaggctgcctggtaggccaagctggcaattagatttgccttctgtttctaaacatgacccagaagaatccaccatttaatttcttacatctaaaattactgagtaaatcctccctccacccctcacttgtcaaaaatgttttagattttcttgaaaatattttcagatcctcaagggaaaccacaccttctctttagctatcccaggagaggtgataatgttaaacccacttaatctggcttcggtcctcagccctattctgggaaggctccagggcctcttacctgcaaagcctccaggaatctgaaggacccaagcctgcgaccacgaggaaccagacagaaagtggcattgtgcagcatttcccgataatcatacctagaaagagaagaggagtaaacagcaaatgaagactcattgcgaatgtggggatattgaccataggtgggcgcccatgtgcatgaatttacgcaaagcaactcgggaaagccaccagcaggcagctctcacttttccattttgaggaaggaggttgggttgctgcatgaagagtaaacatgaatcatcatgttggacaaagcaattaggatcccttttgcaagcagtatatataaagacaagtctgatcgttctggcaacaatttggtttgcccagtctttgcttccaaaatcagatttttaagtcttgataaaatatgttgccccatagtcttaaaaagaagaagagaaaattactggtgcttctccttctcctttaacaatacggcattcagcaaaactaagactgttcttgttccccaccccttcaaaaccatgctattaaaaactattcagaaaacctcaatcacaggcacaaaacaacatttgtcttctctttcaagatggagtttctacacttaaccaagaacgttcagttacccaggaaaaatattcctgtttaagaatggctgacataactcacaggagaaagaggaggtgagagagaaggatgctagcctaagaaagggaaagaaagaataacgagaaaagaaaagaaaaaaaaaaaacctgaactaggagggggtacaggaaactggtctacagaagagatgaatttattttactcaaataccatttaatgatattacattgcttttgcttttcgaaaaaacatacaaaatatgagtgttacctgtttctttatgccagtgaagtttaagaaagataaaaagcatttcattttgtttaggactgtcacttttaaagtgattaccacaaacacattcctacacaggcagtttcaagtacattatgagtttaagaaaacttgggaaagtagagatggctcatgtcctgtaaaggccccgattcttagagccaagatgaaatcactctcatttttcaagagcttccaatgctgagcagacaggtgtgactttgacagtagcatatgtcaccaccactttctgactctaatagtctaatttaatcatagcctaaaggcactgaattcttccctcttctttttgggtatattggtatatacatttatatttttaaagtccacatctatttttatattctcatacaaactaggcatacgggagtaagccaattttcaattataaacccgccattaagaagagacatcatgcaaaggaccatttgcttaaacaagcgtgtacaactaatttgcacaagaaaaggtcaccgtgaatggattaagattatctccattgagagtaaaaattttctaaaacccttgctgcattaattaaattgcaaaatagacttcaaagtaaaaaagatttttaagaaggcttgaatttagttaaatataaaaaaaaaataaattagatggtagtgatttcttcatcctcaccaaacacaggaaaatggttgacaaatatcttcaagttcaaatgttgataatgttttaatctctgcctaatagatggagcagagagaaatatgcacacacacacacactcacaaaaatatatgcataaagtttaagctgatttttttttaatacagaaaggtcgaatatacttcagactacagcaaggtttaataagtacccagaatagaaacccctgagggactagcacagaaggtcccacattctcatcattagcctactaaaaatgtaaaatcctattaatgttctgcattgtaacaagtttcaaagttcctagttgcagaatttactttagggaatgtgtggaggaagaggaagggcagaaaacttataggaaaaattcaaatgacagttatagtgggttgcttaaatggttacatagaaggactatttgctgatatagcaagtaagattgacatgatcgaagcttgtattccttcacataataggtaataggagctgtgggaagaatacccttgcaggagttaggaaaccactaggtagctgtgagacttaaaaaacccatgaattttctatctgtttcctcatctgcaaaatgaactacttgggctagatgactatagattcagttttaatacttgattactctttatcttatcatttttgggtaagaaagaggaatgtcctttgagaatatcccactgcttaggtgtccataccattatatgtatgtgtatatgtgcacaattccatacccatatatgtgtgtatatgtatatacatacgtatctgttcatatgtatgcagtgcatgtctaacatatgtgtgtattcacatagaggctcatacagaacatgtacactcataccttagaacaatgattttcattcagatttctatgcatgctcagcctgtgaaccagcctctctattctactctctggacagtcaatctatgaattactaacatgttctacctgaaggaagaatgatgccccacaagtgggcagacaactattctagtttgaccacgtgcttgatcctctcctactcagcccattgtgatgctctttcacactgcacatcaacctccttgtagatgcttaaatccactcatttattcattcattctttcaagaaatactatgtttcagacactgtcccatttcaacagatagagtccagagaaggtcttctctagttgctggagctaccaaagaagcacctgacaatgagaaaatgctgatgagatgagaatttaagatataaacatctcctgggagtatttgcattataagaggagattatagaaggccgacctttcagaagatacacaaagaagtctgtggccactctccccagcaaaacagcaatttagtaacaatcataaaaacattttaagtctctgagaattgtcctaaggggataatgacaaatagagaaacagtcacccaagaaaatctaccaaatcttggcaagaaccatgagagtctgtggcatctggtccctgacctgttccatgaccaacccctactagctctgccttacaggagctttactctggggcagtgcagtcaggaaggctgggctctccatccccccaggtcccatcaagaaagtgaaaaagagcctacagaaagagagaaccaccgggcatggtggttcacacctgtaatcccagcactttgggaggcccaggcaggcagatcacctgatgtcaggagattgaaaccagtctggccaacatggtgtaacctcaactctactaaaaatacaaaattagctgggcatggtagcacatgcctgtaatctcagctacttgggaggctgaggaagaagaatcacttgaaactgggaggtggaggttgcagtgagccaagatagtgccattgtactccagcctgggcaacaagagcgaaactctatctcaaaaagaaaaaaaaaaaaaagaaagagagaacgtatttgccaatcatatatgataagggactttcatctagaatacataaagaactcttctgactcaacaataaaaagataaataatcaaactttaaaagaggctaaggatttgaataaacatttttccaaagaagacacacaaagtgctgctaaacacatgaaaatatattcaacatcaatagtcactagggaaaagcaaatcataactacaatgaatgagataccactttacacccactgggatggctataagcaaaatgacagatgagagcaagtgctgatgaggatgtaaagagattagaacccttcatacatttctagcaggaaggtaaaacggtgcagccacttcgaaaaatagtttggcagttccttttcaaactaaaaatggacttaccatatgacccagtaattgcactcttgggcatgtatcccagagaaatggaaacttattttcacgcagaaacttgtccacaaatgttcacagcagtttgtctgtaataaccttaaactggaaactacccaaatgtccttcaatgtgtgaatgattcaacaaattgtggtacatccatagcctacaatccttctcagcaataaagtgggacaaactattgatacacacgacaacttcaaggaaattatgctgcattaaaaagtcaccctcgaaagtgtacatactgttgaatcctttctatatgacattcatgaaatcacatagttacagggataaagaacacttagaggttgccattggttggggggaggaggaaagacagggagacttgagaggtcaaatggggggacacagtgttttaagatggactaattctccctcgtttcttatgtttagaaatgtgaatcacataatcacacactacttaaaagaaacatatgatatcctaagcaagaaggtaagtaggtgagggagacaactaaccccagataatttgccactctaataaatggttttgctacccttttcagatgggcattaagttccccacgtgtaggtaaagaaggacaaaaggtagaagaattttcacaaacgactacaaagaaaaatgcaataaaaatgacatgaccttgaatttaacctagacactagtaccactctatggccataatcattttatacttaaagttgtattgaacaatgtatgggatgcaccccatttaaaatggactatgcaataatgcacaattgaagtcctgcccctctgtaggaaacacatttttgctggcagccattctgtgcaactgggaaagatgggggagtgtagcatagagcaggggttctcaaagtgtgttcttccaatcagtggcaacatctgcatcatctgggaacttggtagaaatgcaaattctcagcctcacccaaacctgctgaatcagaaactctgggggaagagcccagaattctgtgttttaacaagccctctggataattatgatgcaccctaaattttcagaaccactggcaccatagttaagagcttagtaattaaaagcttagtggttaggcagcttcagacacagcaaaacctgggttcgaattccagcttttcaatttataaactgagtaatcttgagaaagttatttaatttgtttaatcctagtttcttggttggcaaaatggggataatacttatactgtgaggattaagtgatacattttaaccaaagcacgagcatattataagcaaaccataaaaggtagctattatcattatgactgaaggaagataacagaacataatggaaaacacagccagcttcaagttagaaaatctgggctaaggaatttgggttcttgatctaccacttcctgtgtaaccccagcaaatcattcaacttctccaaacctcaaagttttgaagatcaaatgaaatcatgtacattgaatataaatggcaaagcactatgcaattgcaagttattatggtaaattatatcagaataagagggatataaacatttttaaaacccctagtaacaattaaaaagaatgaaaactacaccagtatcccaaagacagagccaagagacaaatgtggaacagaccctttaaagtaaaatggaaacagaagctgtgaatcacaacagaacagcagcttctaattgaaggcttttgccttattatcaaaagctacatagacaaggatgttgctggtgcactgtgctcacaggtcctcctgtggctcccacaatccctctgtagcacgcatatttgccaagtgaacctgctttttgctaaccaaagacgatagggaagaaacaagtgatccagcctctcatctctgtactcacacaattctagcctccccatgatgttgtcacagtttgtctcaagtatttattcataaagtaacttaacatctacagctgatctactccctccagtccccatcctcataagtaattaatctttccttatacacaagtttgaataatatcccttaagaaaaaaagaaagaaagaaaataaaaataatttatgactgttgtagttctctaaagtgcatggggatgagagaaatgaaattaacatcctttgagcacctccttgcgcctttttcattcattcaccaagcattagttgaatgtctaccatgtgtcaggcactcttcagggagctcactgtccagaataaacaacatgtgttatcaaatgatgattagtcagcgagaggagtgctaggattggacatgaggtagaggtgggtgttatacagagaagagaagcaatggccacatgtaggcagggaggcctcctggaggaagtgagaccctgagctaaatcttaaaggatgtacaagaagcaaccaggcacaggggtaagaggaggtgatgggaattcctgggggtagagatagcatagcaggaacaaaggcaccaaggtgagagaaaccacccagtttggggaggggaaggtatgggggtgtgggctgctgttactggtgggttgccactaggaaggctttctatgacatctcctagagctcagagatgatcccttgcaggtgactggggtgtcactgaagggcttgagcagaagaatgacatggtaccaatggtgttctcaggacttcatataacccaatttcatagagaagcaattaagtttggagacctcaaaaacccttccaatgcaggtcacagctaggaccaaccagcctgtgttccaactcctggatttctcattctaaatcccattttctttccattacatcacattgcctccttggtcagcccatacaacatgcagtgtctaaaactgacatgtcttatgaagccaggtcctaagcagttcacctagtttcaagcatgggctattcgttgccaatttaaaagggctgtttctctcccattcaaaacttcaccccagatcactaccaggagctcagtttaagaaggtactctgtcatctatttactaaccatgttgccttagacccttccttggcctttaaaggtttaacagtttaaaatttcaattactattattattattattattattattattattttgagacaagatcttgctctgtcacccaggctgcagtgcagtggtgagatcacagttcactgcagccccgacctcctgggctcaggcaatcctcctgtctcagcctcctgagtaggtgggactacaggcatgtaccaccatgtcaagctaatttttaaactttttgtagagatggggtctcactttgttgcccaggctggtcttgaactcctgggctcaagtgatcctcctacctcagcctctcaaagtggtgggattacaggagtgagccaccatacctggcctaaaatttcagttatttttgagaaaactgaagtttacagcatgcagtcgtacggaattgcccaaggcaaagatttgaactgagaaacatatataagtgggaaccaatcttttagctggaaaatgggtccaactggccactgttccatctcaattaggagacttgaaaacatagaatatggaaaagtataggtccctggtgtctttgagaattctctggacttaaggagccacagtttctccatgacacctactcacacagagtctctgtgcacacaaatgagctgctatagtacaaatgagctatgcaaatgtgcagtgctaggctctgggactggctgaccaggttggctgcagcttcagggatgcttggcgtccccaagcaggaaggcactcgctatttggaggtggtacaattccttactcaagacagttttttgccttgagcattgcctgctgttagaactgccacaccactccccacctccccagtcatgccaaggattaagaatttatttccttgtgacgctcctcagtctgaggctgctgatcccaagctgtccaccgcagagagcagtgcgtggctaaaaccagggccaggaatttatattcaccctttcacacttcttggctttccacagaagagagtctccttttcatgtcctcttaaaatccatttcagcatagggaagggaggcagataacattttgtgggctggggctgaggcatgaaacccctatgggaggcattcactctcatatccatgatctcatgacagcctcacaaccactggggacgtggggaaagatacacctgtctttcacagggatgagggagtcagaagagtccttggactcaaacatcttgactgaacacgccaggtcataatctcttatcaactctaaactccaccccccatccttaggttaaatgtctactgacagttcagaaccttaaacttagcccaagtggtaattgctacctgtgtatattaatgaacacaacatgtaccaggtgtagctcatacttcaagaggggtaaaagatgaccatctgaattcctgctcattaaataacagctcaatggctaatatataaaagtaagtaaaaaaaaaaaataaataaaagatagctattaataacaactttttaaaaactttttttaaattttaattttttatagagacgagtcttgctatgttgcccaggctggtcttgaactcctggcctcaagtgatcctcccacatccttcccagtccccaaagtattgagatgacaggcatgagccaccatgcctggccagatataaattataataacaacaatacctccactttttaagcatttcctgtgggtggggcactgagctgcacaatctgtaatctttactgtgccttatctttaccaccatcatggagaataggtgctactgaccccagtttacagatgatgaagtaaagtgtcacaggttttgttcggtttgtgcaaggaggatgggatccacgaccagctctgtcatctctcaacctacctaggaggaaagagtaacgaggtgccagcaaaggtgaaaataagagacatttaatacatcgtgcccatgacattaatctcaggaagctttctgaaagaggagaggttttgcagcaccagctttttcttttttcccccctttgagcagagtcttcttgctctgttgctcaggctggagtgcagtggcatgatctcagctcactaaaacctctgcctcctgggttcaagtgattcttgtgcctcagactcccaagtaggtgggactacaggtgtgtgccaccatgctcagttaatttttgtatttttagtagagatggggtttcatcatgttggtcaggctggtcttgaactcctggcctcaagtgatacacctgcctcggcctcccaaagtgttgggattataggcgtgagccatcgtgcctggccagcaccagcttttatacacagcaatacccacttccaaaactcttctcagagaaatgcaattccaagacacatgggcctaaattctctggttcaaaacaaaacgtttttgaaaatgctaaataaagggctacctgagtacagtggcagggagggggtgcagggggaaaagaggggattaacaataaaagagccagcagcaacagtgaactcagatggataaatgggtccagaagagtcacacacaggcccaatggtgatggggaagcctgaggtcattatcttaccattaactacctttcgccaggctctaagccaatgggactggttaagtggaatggagccaggaagtatggacagcagcccgagaagaccaggataggggtgggcagcgcagtgtgtctgttctaagggtgtcagctccccacctaggacaatctgagtcccaggaggctggctgtggagggagcacttcttccctacatgcccctctttccttctttttcttaacttccactcctgctgcctagaggaaggcttccctgatccctggagtttgggaaccctgtgctaactctctattgctcactctgtattaagttgcccatttttctcatttccttcccctggattccgggacacaggaccttggtcctactttctgttgacccaacaactaccttaagggccggcctactgtaactactcaaaaaaagagttgttaaatgaatgtaaggtgctcagtgtccaccaatttgcattaaagtgtacaggggctatggaagcaagaagataacaaagataagatgcaagcccttcattacaacaatgtccactttaacaaacacatgcccaactcttgatttatgctgggttcttccaagaatgagttcattcctatgcttacaccaagcccaatttacttggggaatgaaaaatcgtgttatttatttagtcttccttttgtacattttaaaatcccttctctgtttttatttctacaggtctggcagcttgttaaaaatgtcattttctccctgcacgctgatgagggtagaaaatttgtgtttcaccagccctgacaaatagcattatttgtaaatcaagttaaatgcatgcacagtgcggttcaaactgaaccttctcctggccttcctccatgtctgaactgaagaataaaaagctgtagaacctcctcatggcttctgcaatgacaaaccctgcaccagtccaaaaagcaatgactccctccctctgcacagaaaactgagctcgaaccaatgtctgaccacttcccttcttgatccaagatatcctttccagcaaggccagcctggatcaggcctcggattaggaggatgtttggcattcctactgttctcacccccagggcaggcactgtgcagagtctgtcccgtgacctgcattcttgtcagtgtttaatccttttgtctggcccctgcacttaagtggttataaaatatcttgagaatccaatgacagtttgtggaatgtcagctgatgccaccaacctcaccttcccattttctctcccactgttgcatcactagcctctgccttgtgactttgacagtcagggctgccacctcactcctgagcctttggtaccgaatacacaaacaagacctcagaactctgtgtaggctgatatagcacattcacaaaaaattctagaacacccaacttactatgaacgctgcatgaagctagttgtctatggaaagtttaatctttcccgtctgggtatgtgaatgcataaatgtagagatacatgggtgtatccatgggacataacatttgggttatggttgaagatttgatgccacatattattgatttacaggaatatctttgcatgaaggttgagtccttagggattagagaggcccacaagtctagattctgccatttccttaggcagaagtacaacagtaccctggggaagatggtctgtggagctgaatcacctctccctcctcctcctccagctggccatgcttcccacagttcctttgagaagcagacagagccagctagctccctggcactctcattctggaaagaggctgtgggacagaaagaaaatttaagcactggattgaggagaggtggaccagatggcccaaaggatgccttcatgccctgatatttactcactggacaaaggagtattgagcaggccctacatgtcaggtagcactctgagcactgggacgccatgaagcaagagtactccaggagctgcccattcatggattttgcaattcagtgacagccagagtctcctcacacccttcttcctatacctccttaatcccattcctccttcagctcaagcgtgcatgaacagagcaacagaaaccatactctggttcttactagttttaaacagaatgagttcaatcgtatcttcctgcagtccatagtctatagagcagccaaagacaactttcaaatgtcacccccccagtctgaacaccctccagtggctcctcctggcacttagaataataatcatgccctacaccttggccgactgggtcccatgagaactggcctctgcccacatctctgactgccccatcctcagtcaccatctacagctacaaagtccggctctcaatttcttgacagagaatgctaacttctatctcttgcacttgcacttgctgtgccctctgcctggaattcttctccaggatgtctctcaagctgcctataagcattcaaatagccccttctcagagaggccagcacagaccaacctgtgctcctggcactctctttctgttgccctgtttcatctccatcctggcatttaccaaggtcagaattcacacatgtatttgttttactggcttaccttctttctccccaaatgtaatgtatactgcatgagagaagggagtgttcctgttcttattcaccactgtgaccccagaccctgtactatgcctggcccacagtaatcttttaggaaatatttgttgaacctatgtcagattattcaacactcaccccattcctcatgggtttataaagcctaggtcataaagtgtctgaactgctggcaatgtttgcagggataattcatatgacaagtttctaaaaggatatagagaagttttctttcatctttgttttatacgacgctagctttctctctctagttaatggtatgattcgtcaagttctccaaatgccatctgctatgaaagcaagagcccaataaaaatgtctgcagaagaaatttcttaaagaacatctttagagatgtttatgtaaagtgatacaatgaaaccctgcacaaattaataactaaagcatttatgaatattagaaaggatgaggccaaaaattttcttggaacagtttttgtacatatgaggtaaaatgcagaagatgtcaaaggcctggcattgttatgtttcttttgccttttctttgcgtcccaaattattatggcatatacccaaaatccatctactgcttcagaagtatagatcattttccaaaagaagcatctggaatagctaatttgttaccaaagccggtgattaaacacacatgatactgtggggctgaatggctggccatgagtcccagttttccattgtattgggtttcagctattaaccaatcagtctgtttttagagtatgaatttgtaatgtagatggctcagaactcttggctacggggcccttaatgggacagcatttctgtcacatggaattcttgttgcttggtttccattaaggtatcttggcttttaaataaactgtcaagtaaaacttggcatcaaaacacaaagtgagtaacttcctttgttgagtcgttgacagctccgctgtgtgtcagatagatagctgctaagagtcagctctaaaggcgattgcagtctctttggaaggatgctggtatcacaaactgccttcctcaggattaaggctaagcaaaatttagggataatctttatggaaagttaacccagcaacggccagtcgaccatatccctctccacaagtgttggttttggaattataaaagttttggaggtgtgaaaacataattggaaaactttttttccctgcttaaagggctaattgatttcacaggtgtttaattatcatttgctgtgagataataccttgtagtgccataaaaaatggatttaattttctagtgcttgcaaaaccatttccaaagccaagtcagagctaaagctagataactattctataaatcaaacacactgcctcctttctttgaaatttttaatacttggggataatgatatctgacaaccttgaaactaacatgaaaaggatttttctgccaagtgccaaaagtcaaccattggagcatttcaggcagtttggttcattaacagtgactcaggcagcctcaggaccctgcctgcaggcttccaaaacaccccaagggtagaccattggtgtgtgtcaggacacaatattatctaccaagaccaaatggtcatatatccaataaggtctacagaaaaacagaaataaaacccaaaccacccttagcacaaaaaactgcctggaaacaactgtaactctctaagctcaaactaagagtcctggaacttagaaagtggagatgtttcaacttgatcaagggatactttcctatcttatgcttaaggcacaacacttgtgctttctgtaataacaagggagggaatcataaaatcaaacaaatgttaacagctggaaggcaccacaaagatcatccagtccaaatatccagatgaaaaaaagcagccaggagaggtcaagtaacttacccaagatatcaccaggggcagaaccaagataaaaagaataattctgagtgagcagagaaaggaaaagaaagcttgaaaatagatttagagtcccattctcacccaaaatctaaaaatacaaggaagaatttttaaaaagacaaaaaaaaaaaaagtgaggtttcattctgtaagaggagtggctatttcttcaacggagcccagtttccacagaagtgcttaagctgccttaaataactacatgggggttttagttggtgccacgtttcggatttttttttttctctccaacttctattcagaagctgctgaaatcctaccatgttccattagattaagtgtgcttaaatgatctaagaaagcagtgcaatttagctggacacacacacacacacacacacacacacacacaccattatttaatttatttaatgcatttgtatggagggtgcacataccctaaaccactaaatgacaaagatttttcaggcagttcaggttggccttcacagtgctggataaaataatatacagcaatatgcagtataattggtgccattcttggacactgtgtttgggccctggtagtaaaagcctgggccaaagtcatgtgggctgaaagggcaggggacaacatgggccccagtatagtctgaaaagggttggaatggaagggcatccatagggactggcttgggattgcaatgaaactccttcaatgaataaaaatggtggtaataactctagctaacatttattgagaacttattacatgcccaactctctgcaaagcactttatgtccatttggccatttgctcttccaaaaatcctatgaagtaagtagcattatatctcccattttgtagaagaggaaattgaggattacacctaatttgtctaaattcacttaataagcaggtgggtataatttgaactgaggcattgtgacttcaggacccaagttattgtacacaattgcacgttgcctcctttccataatgctttttggagatgtcccattggctagctaagtgagctctgtcatgagggacaccatgagaaccactatgaaatgcaagggactaatttatgtcttctaaccaaagatgtgcctgacatggggagagagcttttatgtggctctgaataagagataacatctttcccagggtcagccccatctcacacactacttccaggttttggggacttgatagaacaggtgagaaataaatgcctgttcatttgctatatttatctcagccaggaccaccaatggaacatagaaacttcaaggcctcttcctaagactttatatgactcttagtttcccaatccatcatgaggctttggtgccaagacccacaacatgaattttagttccctaataagcttgtggagtctctactatgtgtgcaggtctttaagcccatatggacaaaattgggaagagacataaaacaaatactgcaggagacaatgagattccattcattcatccatccatccatttaccaatagcacttattacgtacccactaagcaccaggcattctattgtcaggatacaatggtgggcaaaataaaaaatcctgttcctttaccattcagaattatggaattcactgtcttgcgtagggagactgatagtaaataattaatcatataataaaatcaacagctatagtagttccaaggagagactcatggttctgtgagagcacacatggtagaggaacttgacctagtcagggggtggggacgaagctgaaacctaagcgctaagtgtccagcaggactggggttcagaatgcagtgctttgagcagtgctgacagtagatgcaaaagtcatcaagaaatttaaagtacttttgggaaaacgaagtatgtgtaccataattagtcatctcaaaaagtcaaaaatattttgctgtgatgtagactaaatccatcggatggtttgcaaaacaaaggttaggactccatgctgcctggaaaaatgattaaagactggatgtctgaggccgggcatggtgtctcacgcctgtgatcccagcacttggggaggctgaggagggcagatcatttgaggtcaggagttcaagactggcctggccaacatggtgaaaccccctctctactaaaaatataaaaattagccaggtatggtggtgtgcacctgtaattccagctactcggaaggctgaggcaggagaatcacgtgtctggatggataaacactttcattcagttaaacatgttgatcatatcagagcattccagattccacatacctgctaagcaataactaaggcaacggacattgacccacgttacagatagtaaagctgcatcagaaaagagccttaacaacttgattagagttaatgaaagatacttcaagttgttctagttcatcttatctgctcttccctggaaacctggcaactcacatttttagcacttatttataagcccctttcctattgccgcaaaattctacaggctctgtagaaatggggctgagtctctaaataatcacattttgatggtaattaaaagccaaattccctaactccctaaatgctatgagcagtttgaatgcctgtgttttgtcctaacattgagcatctctacgaagaaggaaaaccatgttagaaaatactgaaatgacttaattgcagaaagaggcagccttatgatgaagtagcagtgagcttctgctgggatggtacactcaggggaggaagctgctcacaggaagaacgcccaggagcgctggcctcagcccttcttcaagtactcactgctatgaggcctgggccgaggtcctacaggccaggagaagccctaagatgacatctttctgctatggtgacaagtccttcccattgactctaatagttgttaaggtaagagaggtaaagaagggaatttcagttattaaggcattagtttggattggagctgggaacaaaggaaaagccacaactgggcttcatccagcaaagacactattttcatccatctgcctcctagactaatttagggattacaggacctacccagggacctccgatgcagcaaagtaaggatcatattgtgaaggtagaccaggccaaaccattgccacctctaactttaaggctgctaatctcttagaaaaaaactggaagaaaaagttggagagggcagtagggggagaaaacacacacacacacatacacacacacaccatatatatatttaaagaccaccaaatacatttttcatctttaaatcaaagtcctgcatagaaaaagaaagctgctggtaagtgttaaaggaaaggcttgttgccaataatataaaacatgtttataaaataataccttagcatgtagaaataacaatgataatgatgatataacagccacactgttgagagcacactcattcgctgaacactatgctaattacatacagtattgcgtcctaagtgtcacaatctgtaacactaatactatggtcccatttcacagctgcacaccaaggctgacagagatgtgataatttgcccagagttatatagccagagaagcataactagaacctgaacatagccctctgaatctgaagtagatgctgctgaacttcacttgcattttttttaccagcagttttgatgccatatggagaaataggtataaatgaaatctttcaaagcaatgagcactgaaaagattttggtgcccattgcaatgagtaattcaaataatgaactactaaaccttaaaatgcagaacttatatgtatgctatgctgacattaaaatggcttgtttataggttttctgattgctgcattctggataagataaagcagtcatatcctctctccccactgctttgataggatgctaagcacatgtaaagttgtcggaaatcatctcaaacctaaaacaccaaactaagtggcaggtctgctcagctagttgtaaatatgggcctagcttcactttattgcactttgcagatcttgagtttttgtttttgtttttaacaaattgaaggtctatggcaaccctaagcaagtctatcggcaccatttttccaacaacgtgctcaattcctgtctctatcacattttggtaattctcataatatttcaaaacttttattgttattgtatgttagggtgatttgtgatcaatgctctttgatatgttactactgtaattgttttgggatgtcacaaaactcacccatattaagatggtgaacttgaaaaatgtgtgtgttctgactatgctaccaaccagccatttcccctccctctctctttgggcctccttgttccctgagacacaaaaatattgaaattaggccaattaataaccctacaatggcctacaagtgtgcaagtgaaaggaagagtcacacgtctctcactttatttatttatttagagacggagtctcacactgtcaccctggctggagggcaatggtgcgatctcggctcactgcaacctccgcctcccaggttcaagcgattctcctgcctcagcctcctgagtagttgggattacaggtgctcaccaccatgcctggctaattttttgtatttttagtagagacagggtttcactatgttggccaggctggtctcaaacacccgacctcaggtgatccacccgcctcggcctcccaaagtgctgggattacaggcgtaagccaccatgcccggccgcatctctctttaaatccaaggctagagatgattaagcttagtgaagaaggaatgttgaaaggcatgacaggttgaaagctatgcctctcatgccaaacagccaagtcatgaatgcaaaggaaaagttcttgaaggaagttaaaagtgttactccagtgaacacatgaatgataagagggagaaacagctttattgctgatttggaaaagttttagtggtctgcctagaagagcaaaccatccacaacattccccttaagccaaagcagagtaaggctttttctttttttttttttttgtggggggacggagtctcgctctgttgcccaggctggagtgcagtggcgtgatctctgctcactgcaagttccgcctcccgggttcatgccattctcctgcctcagcctcccgagtagctgggactacaggcgccagccaccacgcctggctaaatttttttttttttttttttttttttagtagagacgggttttcatcgtgttagccaggatggtctcgatctcctgacctcatgatccgcccacctcggccgcccaaagtgttgggattacaggcgtgagccaccgcgcctggccaaggctttttcaattttatgatgacagagagaaatgtggaagctacagaagaaaagtttgaacctagcagaggttggctcatgaggctttaaaaaagaagccatttccatatcataatagcgcaaggtgaagcagcaagtactgatctagaagctgcagcaagttatccataagatcattgatgaggtggctttacaaaacaacagacatgcaacgtaaatgaaatagccttagattggaagaagatgccttctatgactttcatagctagggaacagaaatcaatgactggtgtaaaggtttggaaggacaggctgactctcttttaagaggctaatgcagctggtgacttgaagttgaagccaatgctcatttaccactccaaaaatcctaggacccttaagaattaacttaaaagctgtatatttagctttaaagctaaatctactctgcctgtgctctataaatagatggaacaataaagcctagatgacagcacatctgtttacagcatggttaactgaatattttaagcctaccgttgagacctacggcttagaaagaaaaatttcttttaaaatattgcgttcgttggcaagtcacctagttacccaagagctctaatggagatgtgtaagattaatgttgttttcatgcatgctaacacaacacccactctgcagcccatagatcaagaagtaattttggggccaggcacagtggctcatgcctgtaatcctggcaatttgagaggccaaagtgggaggaatgcttgaggccaggagttcaagaccaacctgggcaacatagcaagacctcatctctataatcaaaaaattcagccagactaggcatggtggctcacacctataatcctatatcatcctagcactttgaaaggccatggcaggaggattgcttgagcctaggagttcgagaccagcttgggcaacacggcaagacttccccccgccaaaaaaaaaaaaaagtcccagatggcagcatgcccctgtagtcccagatattcaggaagctgaggcaggagggtcacttgagaccaggagtttgtggttacagtgagctatgacagcaccactgcactccagcttgccagcttgagcaacagaacaaaactgactcaaaaaaacaaagtaattttaactttcaagtattgttattttaaaaatacattttataaggctatagctgacagagatggtgattcctctgatggatctgggcaaagtcaattgaaaatcttttagaaaggattcaccattctagatgccataaagaacattcataattcatgggagaaggtcaaaatatcaacattaacaggagtttggaagaagctgattccaaccttcatagatgactttgtggagttcaagacttcagaagaagtcactgcagatatggtagaactagcaagagatctataattagaagtgcagcctgaagatgtgactgaattgcagcaatcttataaaacttgaatggatgaggaattgcttcttatggatgagcaaataaagtggtttcttgagatggaatctactcctgatgaagatgctttgaacattgttggaatgataacaaaggacttagaatattacataaacttagttgacaaagcagtggcaggggttgagaggattgactccaactttgaaagaagatctactgtaggtaaaatgctatcaaacagcattctctatggagaaaacgattctttcatgaagactacagagaagtctctcatgaaaggaagagtcaatcgttgcggcaaactccactgttgtgttattttaagaaactgtcagccaggcacagtggctcacgcctgtaatcccagcactttgggaggctgaggcaggcagatcatttgaggtcaggagttcaagatcagcctggccagcatggtgaaaccccatctctactaaaaatacaaaaaagaaaattatctgggcatggtggcctatgcctgtagttccagctaccttggaggctgaggcaggagaatggcttgaacctgggaggcggaagttgcagtgagctgagattgtgccattgcgctccagcctgggtgacagggcaggactccatctcaaaaaaaaaaagaagaaagaaagaaagaaaagaaagaaggaaggaaggaaggaaggaaggaaggaaggaaggaaggaaggaaggaaggaaggcaggcaggcaggcaggcaggcaaggcaaggcaaggcaaggcaggaaggaaggaaggaaggaaggaaggaaggaaggaaagaaagaaagaaagaaagaaagaaagaaagaaagaaagaaagaaagaaagaaagaaagaaagaaattgccacagctaccctcactttcagcaaccaccacttgatcagccagcagccatcaacaaggcaagacccttcaccagcaaaatgattatggctcaccaaaggctcagatgatcacaagtacttttttagcagtaaagtatttttaaattaaggtatatatattgaggtttttttagacatgttattgcatacctaatagactacaatatagtgtaaatataacttttatatgtactggaaaaccagaaaaaatcatgtgatttgctttattgtgctctttgttttattttcgtggtctggaaccaaacacacaatatctctgacgtgtgtcttagaacttagtgttcaaaaacagaggcacaaaacccagccactagttcaaaaccttccccttgggaggctaagtggagactgtagaataaaaatgaggaagaataagtcagcaactacacaatatatatgtatttttaaaagaagaaaacaataattgagagatggtttcatgatcttctcactactcctgatttggaaatctggaaagtgtggtatgggtatgagggggattcttctagatggatatgttaggtgaatccttgtagggtagtgcaagttaaaggtataacacacccaactgaatgtacattcatggtgtatacacatatattgcttctgggtttttctatcaaaagcaagagccaaaagaaaaatactcaacaatgaaatgtgtccagtaaccttattcttctgagatattactgtctattttgttactttggaagctttttggttttactgaacatatattttgattatatgcatatgcatagtatttaacatcttttcaacatgaaaagtgtccatcaatggatgattggattaaataaatggtggtatgtatgtatataccatgggatactaactcagccatgcacacacatagaatgaaaatgaggctgggcacagtggctcacgcctgtaatcccagcactttgggaggccgaggtgggcagatcacctgaggtcaggagttcgggaacagcctggcccacatggtgcaaccctgactctactaaaaatacaaaaattagccggatatggtggtgggcacctgtaatcccagctacccgggaggctgaggcaggagaattgcttggacctgggaggcggaggttgcagtgagctgagatcacgctactgccctccagcctgggtaacagagcaagattctatctcaaaaaaaaaaaaaaaaaaaaaaaatgaaagaaaatgaaatcatgccttttgtagcaacatgggtggaactggaggccattattctaagtgaaatgactcagaaagagaaagccaaaaactgcatgttctcactcagaagtgggagctcaacaatgggtacacatggacatacagagtgaaagaacacatactggagactcctcaaggtgggagggtggaagggggatgagagaagaagaaatctacctattgggtacaatgtccactattcagatgatgggcaaactgaaagcccagccttcgccactatgcagtatgtccatgtcagacaactgcacttgtgccccctaaatctatttcaaataattggtgattcagtatgtcctttgtaaaggaaagagtatctattacatagataatctttgccagggactatctgcggttgcaaattggagaatcacaagcagtatccttctggcagatatatttggtttagtccctgttgaatctaaacatttttcttaaattaattgccaacattttcaaatcatgagatttcatgccaaaatccggatttcaggcatctcatgaaaaatgggaagatttggcagcactggacctgctgtactccctcacggcaaattagcagaagctgagctggcttgattcatttattacatcacttacctggcccctgtaggcatctgagttagtaacccctggtctacaggtaaaggggctaaaggtcagatacaactcatctcagatgctggaagcagctttcttagtcgaaataagcagctgtcattagtccaaatagggacgaacgatttgactttaatatgaaatgttttatgtgggctataaaattatccaaactcgacacaggacattttgagcttatttccaaatcatctggccttcatctacccactggaactattactctgctgggtcctcatggaaacatatctttcagccctaacaatgagactacagacatctacgtccccaacacaacagctaaaaagcagtagaatgtcagaaaggctatccacttagcccttggctgacaggccccactgagcatcctttgcgaagtccatttactagctaattcataatttacacaaggcattcagacatagcagctaagatataaaacatttatcaacacagggactagtttgttattttaaaataattatgtttaagtaagccaataaagtctatcttctccaatttacttattgagctttatgaggcaatttaagtcccgattttggggggtatgtatgaaaggagagcatggaaatgccatttgctccctgaagtttttatcttttttttttttttttttttttttgagatagagtcttgctctgtcacccaggctggagggcagtggcatgatcttggctcactgcaacctctgcctcccaggttcaagtttttcttgcacctcagcctcctgagtagctgggattacagatacgtgccaccacacccagctaatttttgtattttttagtagagatggggttttaccatgctggccaggctggccttgaactcctgaccttaagtgatccacccacctcagcctcccagagtgctgagattagagatgtgagccactgcacccggccttgaagtttttgtcttaaaaacccagatcctcaagagaagaccaaaaaatggttgtggtgctcatatctctgagacatcttgcagagaggtaatccctaaatgatgcaaatctggtgaacataatgcacacaggggacaaaccaaacggtgaaaactgatgttaaactataaattttaagccacggacattagtgtgaaactttacagcttcaaactttcaaaacccacacaaaagaatttgtacgacactgatgaaaatttagacactagagatgctcaatcatgcgctctgtaagcaaatcacacttcatggttaattttgttgccagcaggataataaagtgtgatacaaactctagcacagtctcagctgctgttaaagagtctgaatggacagggcattacaatcattaagaatgcagccacgcaattcaaccagtagatggggcacatccacatggcaagcgtcctcactgaaccagccaggtgggaaagaataggccctgcttcctgctctatagccccctaccaaagagttacagagatagccaaatgcagaaggtgaggctgcacctcatctctaaaagaagtatttgattatttccttaacttctctttcattcctatgacaatgtaaataaaacgggtggagactggtgggattaggaggaatcagggttgaccacctcagaagggagaaatatattgaatccactctataaaagcacctccttcagtagtcagtgagtcgcttattcttactggggaccagtgtttactgagtgctcattccatccaggcactgctggaattggatgttagatctacaaaggggaattagacaggaatgggatgtggtccgtggagactgtggcttactgacactgaagtcctgcaaatgccagtcacctgtggctacaaatcatgacagggaactaaacaggtgggcgtgagaatgcttatgggtggacagtggcatctcagtaaagatggggtgctcagaaatgccctctctgaagaagtgacattgaaactgagggctgaggacagaggagaagccagctccctaaagggagctgtgggaagaataattcgggaagtggaaagcatgtatgcagagccccaggttgcaacattctggacacactcaaggaacaatggaaactaagccagtctgggtgggagtggtggaggtgttggcagaggaaggaagggaagtgatatggtcaaaggtatttgactaacagggcagtgggcgttgttagctttgatgcatactcatgtactccacagaaaacacaaacacaaaattatatggtgcttaattttccagatgctattttaaactttttacttatataaccttcacttatttctcacaataactctaaaaggcaagtactattagtatcatcctctttttacagagcagaaaacaagtacagagaggtgaagtgacttgcccccagacacacagctactatgcactagaacccagactggaacggtagtggtctgattccaaagtgcatgctcttcacttctatattctcagaagcactgttttatttcaaggtgactctgtatattttgatatcactatgctaagtctaggtttttttttttttttggcatgtttgttgtttgtttgttgttgtgacacttttgtattgctttgctggcagacggctgatgcgggccaaataagaaatccacaatctggcacagagtacacgcctagacagatttatcatatgtcctgataatcaagcacaattgtgtaccccaacctttgccagatgccggcttcctcatgaatctgggttctgtacatggactccccaaaggacagtaaatcagcgcactagatatctctgcaaagtttccagcagatgcttgtcctgtgcttaccctgcccggctccagatggctccacatcctgctccttcctctcgcgggcacttcagatatgtcagcaacgcagggtgaggaagaaggtggaaggagcagaactaacgtagttctttaagaagccccgcagagcccagaggtattttatatatgcatatgaggagctctaagcccggtcagcataaatcactgccagcttttactacctggacccgattttcaaaaggatgaagttgtttacatgttgcagaaaaggtttctgctaccagttaacctgtcacctgctacaattcattccaatctcttccataggcaacaggttgtatggaattttcctgcactgacatattagcaagacaattctatacctactccgtcctctcaaaagggagagaacaacgctgagaaataggtcccagcaaaaagatgttaagaaaaaattcttaaagcgtatattgcaaatcaacaacaaaaacacaaaaatcagaaaaatttttaaaaagacttcattctttcccagactaaggaacaggtttacacacttttctttctccctaaattaaaagtatccttgaccttatccagtgatttacacacacagcactgtcactaagttttgcttgccttttttgggaacagtctagaccagggtgtccaatcttttggctttcctgggccaggatggaagaagaattgtcttgggccacacataaaatacactaacactaatgatagctgatgagctttaaaaaaaaatcgcgatcaggagcagtggctcacgcctgtaatcccagcactttgggaggccgaggcgggcggatcacgaggtcaggagatcgagaccatcctggctaacacggtgaaaccccgtctctactaaaaatacaaaaaattagcggggcatggtggggtgtgcctgcagtcccagctacttgggaggctgaggcaggagaatggcgtgaacccaggaggcggagcttgcggtgagcgcagatagcgccactgcactccagcctgggcgacagagcgagactctgcctcaaaaaaaaaaaaaaaatcgcaaaaaaaaaaaaaaatctcataatgcttcaggaaagttatgaatttgtgttgggccacattcaaagttgttctggtctgcatgtggcacaagggctgtgggatggacaagcttggtctagataatccctacttccttcctcttctccaaagatacacagatttttcaaaaaagtagaagctgtttttttttaaaaaaatagagttcataacactagtattcatttatttgcatcagaaattaattaccatgacagaaacccaaatgaacatctcagagccaggtgtgtttgagatgagctgactgactccatacaaacacttgttgattttgcttgaatcctctgtaaatttcacttcccacttattagattttcacagaggccagaagacccaaataaaatcttctttacttttttgagacagggtcttgctttgtcgctcaggctggtgtacagtggtgcaattatggctcactgcagccttgacctcccggtctcaagcaatcctggcacctcagcctcctgagtagctgggactacaggtctgcaccaccaaatctgcctaattttttaaaggttttttgaagagatgaggtatcactatgttgcccaggctggtctcccttacttttaaccagtggtaaagaggagcctatgaggtcatcttccattcagtggtatctagactttgtgattatagagcgagaaaaacatccagtggacttacttagaaatgacttccttttgtcttatacttactgagagatttatttccttcatccttcttgtaacctggggggcctggagaatttcacactcattgttccctatcttcctcattctacagacaaatgtagttatagataagattatttatttctgactgtcaagactcatagcaaaacttgcttgtattacaatattcatcctgtctggagatgatggcactaatcgtataaatcgtgtaaataaccaggtgtcttcacagactgaaagtctagaaatgcatctaggttgacaaatatttacaccgagttatattgctttaatttaccatcagttgaagggagaagggggtgagcaatatcacattaataaaggaagagggtattagagcttatcatttcatggaggcttgtctttcttgtgtatattctcaacatacaagaagttaagccaggagcagtggctcacacctgtaatctcagtactttgggaggtcaaggtgagtagatcacttcaggtcaggagtttgagaccagcctggccaacatggtgaaaccccatctctactaaaactacaaaaattagctgggcatggtggcacgtgcctgtaatcccagctactcaggaagctgaggcaggagaatcgcttgaacccgggaggcagaggttgcagtgagctgagattgcggcactgcactccagcctgggcgacacagtgagactcagtctcaaacaaagaagttaaactattaaaatctgaaaaatactaaaaatatttttaattcaaaatataattttcaattaagcagagacttcacctcagagataactgataaaaactgaggcacagagaagttaagtggctgaccaaggtgacacagctggtgaaggacacagccaggactctaaccagctccacatcacaaacgtgctgtaatgagctactggctgcccagccagccgactgaacaggttgtttataaaatggagcaaatactatcaatcccacttgcccttagaaatgcccagagaattaaccaagctcaaggacagtggggatggcacagaactgactgtacaggtgtaaagtgtgatgatttatgcaggaactagctatcaaagttacggaaacctagaattttatccattgttgggtatctcccagtagtgcatgattagccattcttgacgatgattctgtgagctgttagaagtttttgtgtgtctaagtagatctgtctgaaactattttcaggttgtatgaatctttgtctaggaatttgcttccctggcctacccaaaaaaaaaaaaaaaaaaaaaatgaagtgcattttgttctgttcacagatagctttctttcttgctactcttggccataagaccaactctaaaaacattggtgaccctgaaaatgtctcaaggacattcagtttactttccttgcctctaagccactccttcttttaaaaaagaaagcttgaggaggctgggtacagtggctcacgcctgtaatcccagcactttgggaggccaaggtgggtggatcgcgaggtcaggagttcaagaccagcctggccaaagtagtgaaacctcgtctctactaaaaatacaaaaattcgctggacatgatggtgcgtgcctgtagttctagctacttgggaggctgaggcagaagaactgcttgaacccaggaggcagaaggtgcagtgggccgagattgcaccactgtactccagcctgggcgacagagtgagactccacctcagaaaaaaaaaaaaagcttgaggaaatttatagcccaggaaaatgagtggggaagagatgctatttaaatgtaaaatcactcctgctagaggtagtggtgggagtggggagagatgaaagaatggggtgggtagaagaaaatgtccgtccatgggcaattccatttttggctattccatggagacaaaccaattagtgtggattttcaaggtggtttgtgtgaactggctacctgcccattatgaattggactgggattaactagctcattccaaacactccaccaaacagcaaatggtcacaggaaaatgatttttagtcaccaacaacctggctggattggaaacttggagatgaaagccttgataacctcctaccaatctacaaagagactgtgactccttcagatctacccacttctaaatacctttttctccctgccctcttcattctttgcttttattccttaaaaagctcttttgcagttcggaggctgtttgtttttctgaacataaacatacctatcaaccaaccagcctggtaatggtcaatgtgtatgaacaccaccatttatgtgtttcatcatatgagcttgcatgactgcctcatctataagtttaattcaacccccggttctagaaaccagtttacttctaatagagaagccctgagaaacttgggctcaatattgagggcttcagcacacgactaatgccataagcacttttaattatctgtctcagcttcttacagctggaatttcccttgttccagacacaaagtccttaactttatattccaggctcaggaacttggctccagggatcaccaccagccaccagcatgttcattcattcttttctccaagcaaatgatccctacaccagggttaacaacctcatcaagagaggctaaggcgatttcagctgcaaccctctgtatgtggcatccctgtggcttcccaccttagataattgctatcctcctttccctcacctattcccttatggggagccactcagtccctttggcttaggtgggactgatcaccactcctagggtgcagcatgtgatctaagtataagccacaagcacatcatcatatttcccaggccacagtttttcagggatggtgttgggaatcattgaagccaatatggctggtcagcttctttaattttaatttaaaaatgttttgtttgtttgtttttgagacagggtctcattctgtcacccaagccagagtggagtggcacaatcatagcttaccacagcctcaacctaccaggctcaagaaatcctcccacctcagcctcctgagtagctgggacctcagtacatgccaccatgcctggctacttttttattttttgtagagacgaggtcccactatgttgcccaggatggtcttgaggtcctgggctcaagcaatcctctcacctcggcctcccaaagtgctgggattagaggcatgagacaagtcagtgccggtagtatctgcagtagaggtaggtagaggctatatatattcttccacacatcctcacgaccaaggggtatgttactatgaaaatatgtcacggaacaaatgttgaagtcctgccaaaattccagcccatagagcagggcctgatacccactgccaggccacattaatgctgatgtggagtagccagccctcaacaggctgcctcctggacttcctccactaacctggcctggggcccccaggacctccccggagccaagtgcctgccaaaaatctcactttttgcacaactctatgttccctgctgtgtgtgttctgcctggcgggctggacttcccgccagcgcccacaggcccccacccagtgtctgccccactttggcggatgaggcttctctccagacccatgtcctccagtttgctctgtgaaccccagtgagcctgcccaagcctgcctccatatccaccatgaggaagaatttaatgaaagaaaaccaatgtgccaatctctaatactggaacagaagttccaataggtggtgaagctcaatcttgcccataaatagtgatttatttgtttggcgcagaggattggaaggacaaactgtaagctcagcttcaactcagagctggctaaggggctggcagacaggtcaactctctgagtccaggatgcacaggaatgttctggtctcaagtgcatgatgaagtcaattaccagaagttttttaaatcctccaaagtatctacctccttgtcctaaactatgactggaaattcaaataaaacacacttagtaaatttccttctttttctggcaatactggcttttattgaaggatgatgtagcaggaacaaagttcattctcaatataacttatcactttatactatctacatcttaatgtcaaacgcaataatctctagcatataaatgctattcctgattttaaaataatcctatttcattaagctacattttaatggattctacttgaaaaggaagggtggagttcaaattccttagccataaacattcattttccctcatatttatatttacatacacacacacactcacacatatatatctccttgaaataaggtaatgttaggtgagtagtacttttaataaatgtagttccaaaaaatcaaatcaaatagtcctttggatcatgaattactttgtaagattcagaaaaatactcatttttctatgagagacaaaggaagaaaacaatgaggtgatgttgctacccctgttgcgagaatcaatgtcccccaaccttgaagcactattgatttcaaatgaaaatgttgtttctgtagttttaagactttgctccttactttaaaaaaaaaattaggaaaatgaaaaaacttcatctaaagatgaccaaactattcaattatttccgtgatggctcatttctcttaacacataaacaaaactaaaactgaaggaattagatgtgataatgacatatctctcaaatctcatggtaaaattggatgctcagtggcattaaaacacatctcccaccaataactttcctctgtgattgccaaggtgtaggtctctcttattcaaacatctgagaattgttatgtctgagcatctgctcacattcaacatttgatgctagtctgttatttgctagggactttcctaggcacaggggatacaaaggtgatcctctgagctaaaaatcagtgtatcaacgggcattaagtagaaggagcaaggaggggtctgatgttgatcttgggtgcaccatttgtttccaaattctagcaagttgtccatcagtctgtactatttaccctagagtgaattgtggacacatggctcattcataatcagtccttagctccatccacatttattttactgtcatgcaacttgctccagagtaggaggcctcttcctactccaagtgttagaaaatacagatgaactttaccattccacaaaggataaagggattgggagcctgttgaaagcagggacagtatcactctacttggtgtcccgtatccacatcaggactcagtgggtataccataaatgctttgtcacacacacacacacacacacacacaaaagattgaaggaataaaaaacatattttttaatgatccaatttaaaacatcaccttagtattataaacagcattcaggggaataccaactgagtttctattctgcagaagggtaaagcaatagagagaaaaaaggttaaaagagcaaatctctagccgatgtaactgggaaaaaaatgtaaaaagggctgatctctaactccaagtcctgagcacaatctttggctgttgtatagaattttcctatgcattgcctgcatcttacagaagtatttaaaagccttccctaatctgcccttgtttagttttagctgtattctcccatggttttctgatataatcaaggaaaaaatcaaccctaatagtgttttcattattttacagtacaattattttgagagcatggaaccttctgagcatgttcctataacttcaagacaaaaatgcagtactgtttctttcaacataaatgcatgtactggaatactctggcaccaacaataggatcaaatgatagaactcttcgttcagaaagcctgtaagaagactttatcctcatccccgtgaggggcttttgcacacatctgtttcagctcagtcccctagagatatctaaaatctaattaaccaattaatttgcaaatatattctaatgtatgcaaggcagattttcttgggtgttaaattatctgacactgaaccatatacagtacacaagagcgggacctcactgaaataccacaagttaccccaatgcaagaacggctaggtgggctctggtccacaagcacttctattccctaatgagaaaatgagttaccatggtcaggttaggttgtgtgtgcttcagtaaggtactgctaaatgcactggtgagacagaggggtcatcaggcactctgaggcttgtcttctaaaactgcttccacagtatcccctagggtagggctggggtgggcacggttgcctggggccaaggaattggagaaaaaataagccagctcagtggctcatggctgtaatcctagcaccgtgggaggctgaggcaagacgatcactggagtccaggagtttgagaccagcctaggcaacatagcgagaccttgtctctgctaaaaataaaaaaaataataattagctgcatggggtggcgtgtacctgtagtcccagctacttgggaggctgaggtggaaggatctcttgggctcagtagctcagtagatagaggctgcagtgagctatatcacaccactacactgcagcctgggcaacagagtgagaccctgtttcaaaagaaagaaaaggaaaaggaagggagggagggagggagggaaagaaaaaataagatgatgatacatatttcacttagtctgttttcctagggtggatgaagggaagtttaagctatgggaagagtatgctctatcatactgggaattactaactgctattaatttgcatgcagaactctgttcttcaagaaagcagccacagcaggtaacattgtttactcagacaatcaagttgtaatttactgaacttgtggattaaaaaaaaaaaggatgttcttaattgctacattgcaacaatttatccagctcaatgactgtatagctacagataagaactcagaataacactatcaaatgttagggggattacctaatttacaaaatgaagagtatctcaatgcacagtgtgttgttacctaaaaatatggaatgtggattttaatatgtttctgataatatgtttggatagctgctaattgtgcagcattaaagcaaagctgattttgttatttatcttttattcaagacaaattattattttgattattcacaaaatggaaaagaaagaaatggcaatattatacaatgtgttttggtatcttatttctataatgtaaatttttctactattcaatcactttcaaagatctccaaacacatattaaagcgaatactgaagcagagaaaaaaaaaaaaaaaagaaagaaatgcatgtccagtttagggttgaggaagccaagatgggatttttacataataaatagattctaaattttcttcaagggttagggagaagttaaagagaaagagtgttagtatttgctatggtctgaatgtgtgtctcccacaaatttcatatgttgaaatcctaacccaaataccgatgggatgatgatgtggagcttttgggaagtgattaggtcatgagggtggaaatcttttttataaaagagactgcagaatgattcttcaccatctcagccacatgagaatacgatgacaagcccgcagtctgtaacctgaaagagggccctcaccagaagctgaccatgttggcaccctggtctcggactctgagtctccacaactgtgaaaaataaatttctattgttcattagcagcccaaatagactgagttcttacagttaaaacgtggattggtcaattcataatagttgcctaaaagggtaatctatatatgcaaacttctttctgacaacgaaactacaatttcccatgaagttgagaggggttaagaaaatggagaaaattagcaagtatggttaagaccaatgttgtcctgtgacttttttttttttttttttttttttttgagacagggtattgctctgtcacccaggctggagtgcagtgatgtgatctcggctcactataacctctgcctcccgggttcaagtgattcttgtgcctcagcctcccgaatagctaggattacaggtgcatgccaccacgcctggctaatttttgtatgtttagtagagacagggttttgccatgttggccagtctggtcttgaaatcctggcctcatgtgatctgcccgccttggactcccaaagtgctgggattacaggcatgagccaccgcgcccagtctcactttaaaggagagagttaaagtgacatctaaagatatgcatcccaataggattggggtgattttcaacattcatataaaaaatgagtttatcaacactcaaaatagatttatttggtatttctagtttgtttgtttaaaatgccaacaaaacataacatactatggctatcttcctccatttgaaaagacaagtaatgtggtaaatatgctacaaagtggcctaggagaatttcttaggtatctcctttgactaacatactttaatccttttcactcttgttagcctcagcattagtgtaggtgcaaagcagctggtgagtaaatttgggtataatgagccagtctagttcattctaacaatgagaaattcctaattttaaatggtcatttcttttttaaatagaaatgaacagagaggtacaaaaaggctttggtagagtatgtcataatgcataattatgaatatatattgtcaagtttgtatgacaatttagatctttaatgttttttccattatatctttttaaagggaacaatcctggccggacgtggtagctacaatcccagcactttgggaaggctgaggcaggcagatcacctgaggtcaggagttcaagaccagcctggccaacatggcgaaacctagtctctactaaaaatacaaaaattagctgggtgtgttagcacatgcctgtaatcccagctacttgggaggctgaggcagaagaaccgcttgaacctggcaggcggaggttgcagtgagctgagatcgtgccacttcactccagcctaggcaacaaagtgagactctgcctcaaaaaaaaaaaaaaaaaagaacaatccttttcctcaattatcctgggtaatttgatagatgagctatcatataatcccctcaattgatctactctgctactcatgtgcccacaaaaatctaggcagcatactactgacaatgtgagcttcagaaagtctttcatccaaatggattccaataccaatgatagaagaaactagtaaatatattccttttccatcttctttagtgtcaaagcacagatacaggtgactgcatcttaaacactgcccagttttcagcactgtttcatttcctgaattccttcttcctaactgtccattagcggctttgacaatagtgttagccagatagtctcctttctacacatataaggtgcaaaaataaaagattttaaactgcagcttgaaggaacaaagtattgttatgttggtcaggttttctatggattagacgttaaaaaacagtggcaatagaaatattggtactcttctctgtgagttgatatgaaggctggaaatcagccgcctaagatgatcatttaaaggtaggggatggggccaggcgccgtggctcacgcctgtaatcccagcactttggggggccaaggcaggcagaccacttgaggtcaggagttcgagaccagcctgaccaacgtgctgaaaccccatctctgctaaaaatataaaaaaaaattagccaggcatggtggtgcgcacttgtaatcccagatactcgggaggccgaggcaggagaaccgcttgaacccgggaggtggaggttgcagtgagctgagatcgtgccactgcactccagcctgggtgatagagtgaaactacctctctaaataaataaataaataaataaataaataaataaataaataaataaaataataaaggtaggggatggcaaaggaagaagccttagtatttgccccttctagcctcttgtttctaaaataacaggtgtaatttcagagccccaactgctaattccacatgcaaaattgttttaggcaatcctcccaatgcattctagagacttttcagggtcatttttatttgttagatttccacggtattcaagtttctaagtaagcaaaaattatccgttgccaagtaccatctttggggagaggagttgagggaagaagaaaaaaaggacagagaagaatataaagaaaagctgaaaaaacatagatcaggccccaagattccaggtttccagatgagcaaatgcccatctggcccttctccccatgcaagcagtgggcagtgaccgtgggtgcttactgcagtgggtagaaccagtttctaaattcaaaccctccaggcagggaagagggcaactggctagtgaaaagagaaatgctgaagactgaaagctgaactgaagctttccttagaacctaaagaacacaaatgaattcatgcaacaaatattctgagcacctatccatgccagaaactataagagatgcccaatatgtagagataaataatattcaggccttggcctaggggcactaagagtctaatagtctaaccattaatcaaacagcaacaataaagggtgataaatactctatgtggaagtgtactcagagtgtatcggggtatactgggacagagaagcatctaactcacaaggaatatatccagaggaaatgacacttgaaatgaattttaaatgacaggacttaagagacagagaaacaaggagtacttgtgtcaaaagagagaatgcaaaagagtatgccataatttagaactttgcaacagaaaaggcagaaacacagagcaatttatttcagaaacacccaaatttattttaaaacatactagactccagacccagagagtaaggatggatgcttataaaactgcttttttaaaatgttccacatatgtggtccaatgggaattttaagaaatgcattccattccttgttgataaaatagaatttgggttatttactattttgaaaaaagaattttctacctgctagaggtaaggacgtaggataaaataaataacaataataatgataataaatgggagatgtggggcatggcatagcatctatttataaaagatcttaacactttgtgttttctctctcattactttcctatcaggcaggaaagtaatgaagactgacacaaaattaaacaattactagtcactagtgattggagattcatttgtttaccattcattcttccacagatatttacggaagcgcgtattaagtcggaggccatctttctaaggtattagaactacaacagtaaacaacaaaattgtaaaggaatgtcacaagtaagctgaaatgccatagacatttcagctaccaggctgtgggaaaaaaggatgacattgaaataagaaaacgatatggccagccaggaacccgtttttctaacagagaacccctggatgtgcctcaaagctaactaaggctctggtcatgtcacagaggcgtgattaaaccagccctaatgactgagtaccttgaagactctggatgttaatgacagagtatcttttgcacgctgctttccttttagtcagttcatctttacccagtgcagactttaatgtttgcaaaaaccggaggccggcgcaactgaaatggtcaggccttccctagcctcatgagagaagtcgctgaattaatgaggaaccagatgtaggctcttcatagttggagccgccaccccaagaaaagctccagggaggggaagggaagtaagcaatggccaacccaataggaaaccttcacagggagtggagagcattttctggccagattctgcaacactgagacttgttgtctccactgtagcacaactacagccaagctgaggtgagaaaaaaataattaggtcccaaatctgcattaaaacatttttgcagggttttgttcttgaagtggaaaactgttcccacaaggtctatttttaaccattttattttaaagagatcagaaagccacttcatgttgaaatttctcagtggggaattttacagtaatgctacttaaatccaacctaacgatgacaaagcagaggaaatgagtgaatgggctaagtctgtggaaatatagcagcccctcccgcttaaatcaatgtcatggctcagagaggctgtgagtacaatatggtggtatatatgcttcctttctgacacaattcaaaagtcaagcagaatcctgaattttaggaaagtactagttcacagtcaactttttctgttaaacaacaagttttaatgtttttttctccctaaaattacgcaaagactactagtatttcaagtgattaaagacaccttggttataataaactgaggctatgccccttggtgatttcacttgtggtgtcaatttatttagagaaataaatattcggctaggtgcggtggctcacacgtataatcccagcactttgggaggccgaggtgggcggatcacttgaggtcaggagttccagaccagcctggccaacatggtgaaacccccatctctactaaaagtacaaaacttagccaggcgtggtggcaggcacctgtagtctcagctactaggatggttgatgcaagagaatcacttgagcctgggaggtggaggttatagtgaatagagatcacaccattgcactctagcttgggcgacagagtgtgagactccgtctctaaataaataaacaaatacatattcaacctactatccagagtcagattttctattagaggcagaaaaaggaatgtgattatcctgagtatacacttcagtaaaataaaatcaaaggaaaaactcattgaaaataaatgacatagcacatttcatcgaccaaatatttggtggtcatctactgtgtgccaggcacttgagatacaccatcaagaacaaacctctgccttcatggagcccttattttatcattaaacacacaaaccatgttgtagaaattagatgacctggcataaggttggccaagttgtttgtgattcagcttaaaatctctcaaagggctgaagtgaggagcattaaagaaggagaaagatttctagaacaaccaatctctgcagataagaatatccagtgctgtaaatgcaactacctcaatgccctttcttattctcatcatcaccacaagtccaggtttagaatcttccagtgattccattctagaacctgagaactataaacaggcacaacagtatgatgaggatgtcatgccagtgggctgtgttgcagtaacaaatgaccccatcacttcaatggctttcaacaacacatccattgagggttggctgtgggctatgctccacttcttcatggtgagacccacgctgtagagcacctggcctctgagacgttactgttttcatggcagaaggaaacatgagaatggtgaagccataaaatggcgcttaaagcttttcctcctaggtggcacaggtgacttgagctctcatttcattggccaaagcagataatacagctagatgtcaacagctcaagaatatatcatcctacaggcagcaacagcaaacaaaacactcagtgatgaataggttgtagcatttatcagaatgcaggtgactaccaaaaaagatgtggaaaatatttctaacccttccattttcccagacatgtgattactattaaattgtgagtgaatcttctgaagggaaactactccctttcatgtcataatttctccccagaccagtagcacacagaacgtaaagtgaaacaaaaacagagcctggagaagttagagaaaactaatttttctttctatggttagatgtcaaacaattcattttccccctcaatcattcctttccacatgaaaaaaaaaaaggaactctataatgtggaagactacattctatattttattttgtagctagtaaattcttcctgagatccacatggtactttatacaggcaggaggaaggagacaggttatggtgacactaacctcttgaatttttgttatgcatcaattagatgaaattagaatacaggaaagacataccttagcaattgcaatgggcatcactggcctttgtttcaaaagagtgaccaagcaactacaagaacatgcacaatctagagttaaggagtattttatgcattttccccccaaaacacaaaagagaactagaaatagttcagatcagtctctggtcactcctaaaaagatgtggtcctaaaacagatttgagttggtattatttcagccactttggaaacagcctaccacttatgattcaaaatccatacaccatataaggtgtgctttggatgagtctttcaacttttctacatgtttaaacatttatgttaatttataaataaaacattagggggaaataatgagtaagcctggaccttcagtaagcctgaaaataatgagttagcctttgaaccccaggagcaataattctctatgcataatcatgaatgaaattcccttaccatgtgggaatttttgacaacctctataacctaaacaataaataccattctacaagcaagtttggtcccaggcatgtattcggccattcatccaaagagcattttaagttacaacatgtgtgtagaactctgcttaccagttctagattcatttgcttcaagcaacatgccaagctaccaaatcaacaaatggtcaattcaccaaagacagcgtgctgaatgaccaattttctaaattcaccaggtttatgaacttgttcctttaaattatttatggagtttgcagtagtttgtatataatgggatggagtgttcttaaaattgttagatttctgaagttcatgacaggttttcctactgccttcatagtattaaaggaatggtcaattcatcaaaagctaaagatgattttgttttcttatgaatgtttaagatctagaaaaacgtattccataattagtaaccaatgagtcaccagaaagttttaaaatatatattgctatgttttgcctcttttttcttttttttttttttgagacagagtgttgctctgtcacccagattggagtgcagtggcacaatctcagctcaccgcaacctccgcctcccaggttcaagcaattctcctgcctcagcctcccgagtaggtgggactacaggcgcccgccaccacgcctggctaatttttgtatttttagtagagatggggtttcaccatattggtcaggctggtcttgaactcctgacctcaggcaatccacccacctcggcctcccaaagtgctgggattacaggtgtgagccaccgtgcccggcctgttttgactcttttatgaactcttttgtttgttgggtttatcgacctattaacctttttaggatttttttaccttatgcatcttttaacgcttttgcattactcttgttttggattaggtgtagtatttaagaacatatcttccttatacaataaagccatctagtagaaatcaagtgcaggtgactggaatgtatgctcaacaagggcaagttatggtctagttcagaggtggtaaactatggttcatgcattgcctgttttcataaatcaagattttttaaaaaacgcagcttgaacttgttttatgtatttctgtggctgctactacagaaaaagaaaaaatgtcaccgtttaatggttgcaatagaaatggtgaggcctacaaagcctaacatatttactatctggaacttcaaaaaaaagaatatttgggactagggatctagtttattacagtatccacagctcctggagcaatgcctgactcatttaggagggctacataaataccagttgaatgaatgaataaatgactcctggtttttaacaaatggctaccccgcattcatcactcatttcagtgcttactgtctcacaactcatgggctggtgagaggtgttggttcttcctagtgacacagaaattaggcaacttgagtcaaggggtaaagcaaaccacctctgtggttccaggactaaggccaattgtaatgcagatgattggtttgcggcaacgtaaaaaccaactcacatttctgcaaagactatattgggaaactccaaacacaactaagccggctggtctgcaaaaactcaagtcactgtttgtccctaaaaagaaaagaaaatgtaggttggccaatccttcttccctcttctgaaggttggcagtgattttgtggtcgaagtgatgagctaccctgaaaagtcagaaggaaaccacaaaacccacgcccattgctcctcctaagctacagctgctgctgcacacagcagaaatatttatattctgccagagatcccccaggactatcctggatagagtagcttctacagacgttattctggtgggaaatactacgaaaaagtcaagtgctgatcaatctattgggaattttctgccatttaacacctgttaaggaacctgtaaccagacaaaaccaagtgagctagaattttattgttgtttaatttaatttatttatttagacaggttctcactctgtcgcccagactggagtgcagtggcatgatctcagctcactgcagctccgcttcctgggttcaagcaattctcccacctcagcctcctgagtagttgggactacaggcatgcaccaccatacccagctacttttttgtcttttttggtagagaatgggttttaccatgttggccaggctggtctcgaactcctgacctcaagtgatccgcccgccttggcctcccaaagtgctgggattacagtcgtgagccatcacgtccagctcgtttagttaactttgaatggcaagtggcaggatggttgattggttggttgagaggtgtctagcagtcctactttaatttcctcttgcctgttaatgccactatgattaaggctcctttcctccccatccccatactaattcctaattcatctcagtaaaattccccagggtagaacaaggacacaaatcattactatgaagctgtaggggtaccctaagtcaactcattttctccaaagcaggaacactaaatcagtccttggtgcctatcacttttttttggtattctgggtataaaaatatgatatggcggccaggcacagtggctcatgcctgtaatcccagcactttgggaggctgaggcaggtggatcacttgaggacaagagtccgataccatactggccaacatggtgaaaccctgtctctactaaaaatacaaaaattagccaggcatgatggtgggggcctgtaatcccagctactcgggaggctgaggcaggagaatcgcttgaactggggagacagagattgcagcgagccaagatcatgccactgcactccggcctgggcgacaaaatgagactctgtctcaaagaaaaaaaaaaaaaaaagaaagaaaaaaaatgatacggcatcatacttttgttcaaagagaatttgttgtctgggagaaagaaaggcctaagcccatgtaatatcaaggttgaaaaaaatgaaaagaaattatgttcgaatactaatgcatactcaatattcagtgaggggttctaacccagctagcacaccccagaggtataagtcttgtctgacatcaccaataaataagagggttcacttatgtgatttgaatttttcttttgagtatcggaacatttaaaactagtcctgggcacccagcctttgaggaggaaaaagtcaacttttaaggttccatttgtttgacatcatcccctggtcaacttcttgtaaaacttctttggccgctacactgcaattcttgagattacaacttatttctaagtaatttcaggaaccatccgacaaggcttatccttattgccctggatggtgctgccaggaaaagcaatgataaaagctcatcaaaatcatcacagctatgaaacagccacagacaattccgaaaggctgggactaatccttgagtccactcagtctctctcctaaaggcacatctgttgacaactcttttctttctggctttctaagatccctcaataccttcatagcaggcaaacagacaaacccaaactagagctaatgtcagcaaagtccactagcgaagcaatccttgtaacgaagtgcacctggagagccctttggagtggtagggaactatgcaagcagctttgtgtggctgtcttttcagagaccacagatcagctggagcttagaccaggcagccgtctaacagcattagcaggtaaactgcagtccgacttgaatgtacattttaaaaatttgaattacacagtgtagttcctctgtaagaagacttcaaagttttcgtgccagaaaggtgcaaagtgacttctgccttcacatttgtgagcttttcaccctctcaaccagcttatgagtgtcacttggggatttggagagagtcggagggaggaaggaaatcttttctctttgtgtcttcagagagactcaggagattctgcttatgtacatagaggttaataagtgactttaattgaaaaatggccatacacttgaaacaagattttgctctgaaaattccttctatctgtttaagcatgaaaagaagaaaactaaatattatcataccttcctctcctttctccacgccattccttggcatctgctactccatcccagacagcaggaaaacaagaaagagtcttccattcccaaaagcccccaaagaagaatgaagggggaaagggattggcaaatatccctttggtgtcattgcttgggaaagagtagaaatctgtgacaagtcaagcctaccttcaggctgtccagctgttaaagtctgcagccacttggaggtgctggaggtaagtgagctttttcttagatgcaatcattactgccaaatgtagaaggtgggcagtcggcttcataccacccaaggataaacagccactgattacagtaaacacgcacagcaaatgcacatcaaacacatcctgcttcaaattaccgttgtatcattagtgtgcaacagtctctatacttttcttaacagcatgctagaaaaaagccccccgcccctcaaattctcttctattctgttcattgcactgaaatgaaactgtgtgaatcccactaacacttaaatattcacctgctgtgctgctttattaaacaagcacttaggagagtggtttgttgggaaaggggtgggtatagcacccagctacatgctgcaggatgaatgaaaaaggaacttgccatcacatcccgtcttctctccagctttctgtagcagcaacctggctcaatttcccttgattagcacaaagatttagaatcacttttcaaaaagtgctaatcagctttagtttcaatggatcgaaatacaacataaaagtggttttctagttaatacaggcctgctgattttttcccgtgagtgcagcattagagatgaatctaaaaacatagctacaaataggtgtttattttgaaaacatccaaaacatccagctaccatacactgttgaaggtgagaaaatggtgtcaaggtacagcctacctatcaatatactcttcaagataaataattacttatataataacttccctctaattcatttcaggacagaaagtattaggtactaaagaataaagcaaataaatcaacactcatcttaatgcattccttccaagtgccatgtatacatgtgaaagtaaatattttaagtaaatatcaaaagatgggaacttgcctagagatttacatgtaaatttaacagcaaaatcaaattgtcatattaagccaatgtttcttaatatctaaagtctaaagttgttctggcaatattaaccgtactggcaggggaggagaaggaaaccctaaaatagatttttttttccctgaaaatggaaagtaacagacaaaaaaaaaaaaaaaaaagaaagaaagaaatctagaatgtcatctttgagacacagtgatgaagacacatgtcagtgcctcctacaggtacaaaatggtaacataccattagaggaggggaaactatttcttggcttaaaatgtgatactgaagttcttcaagagactcctaccaacttgttccaccaagacttttcttcctgtcctgtctctgtatttttgatagccattcacatattctgaggaaatttagagcttctccctagtagatatcctatgaaagaattcattaatctttttccttctctcatatgtcactataatccacatgtacacctgggggcttcccaactccattatctctgtaaaagccagcatttctgtggactgctccagtggacattggccctttgacctttaatcaagggctggcaggagatcctagagtatggtggaatgagcttagaattttgagcctattgaacctggtttcaaataccagttaaaagttgcatgactgtgtgcaagccaattgtgtgacctctccctgaatctcagttttaaaatgtatacgatggaacaaataataaacacttcacgaatgagatgaatatatttactaaatacctgacatataaagatcaaaaaatagcaaaaaatagcaaaaatagcagtatatataaaattgtaccttgtaaatgagctggcttcagaataaagtttttgtttgtttgttttgttttttggtatttcaggaattaaatcctctttgatgtagtacaaaatggaaaccaccttatactgcactgaattcattctcatggtgaatgctattcactagggttccagtgttctgttagtttctttccattccagtgggagctctactagaaatactactacacaagtggcatgccagtcaatttgatgacacaaatacttggtgctacctgctatgtcccccaaatataaatgagcatgaatactcctactttcaaagacaaagcagttaggttgttgacttagtaaatagctactaaaacaaattgccacactactcaacttatgtgacggatgattctcctgcaagttggctaagcaccaaaatgtcaaattccaaagaaaagctacactttagagataaaaactagatatttacccagtcatcagccaccactgggcaaaatcctgcagaaactcctagatctctgccatctgcctgttcgtctcattccatgttcaaggcaattatgtccattcccatttgtcaatttcagaaggggtggtttctacctgctatgaagtggtgcttaaatgggcaaaattattcaagggcttcaatcttcctagctggaaaacccaaataatataggacagaggttaaaagcttaagatttaaaaaaagaaaaaaagcttagaatctgaagtcagatggccagagtttgaatcccagttttatgagttcccagctaggtgacttttggcaggataactgatctttctgtaccttaatatgcatctatataacaggaatgaaataaatcatagtaggcatgccattgacgatatagcctctgtttaacagttcaaccaagaaagctttcttgtcataaaatgggatcacctttgtcttttatttgtaatatataacaaatattgttatgtttatgttctagaccataccttaattttctaagatatctattggccaattatttttttaggtaggtctttcagaatagtatttacgtgactctgagatatttccttctccttgactaaggcaggagaaattttccaaaaatattttgtaaggagtttgcatcaagcaaaacatgtttccaggaacatcttcaacccttttttcttttgccttgagacacagtctcactttgtcgccaggctggagtgcagtggcacgatctcatttcactgcaacctccgcctcccaggttcaagcgatcctcctgcctcggcctcctgagtagctgggactacaggtgcgtgccaccacgcccagataatttttgtatttttagtagagacagggtttcaccatgttggccaggatggtctcgatctcttgacctcgtgatctgcccagcttggtctcccaaagtgctgggattacaggtgtgagccaacatgcccagccccctttcttactctttctattcattagtttctctctttctcattgcttatctgacctctctttttgatcaaatatccataatttaaaggattattatcaagaaactgataaaatacaataagactattatatttaaatataatgcctcttctcgggcctggcacggtgactcacgcctgtaatcccagcactttgggagtctgaggcgggcgtatcacctgagctcgggagtttgagacctgcctgaccaacatggagaaaccctgcctctactaaaaatacaaaattagccgggtgtggtggtgcatgcctgtaatcccagctactcgggaggctgaggcaggataattgcttgaacccaggtggtggaggttgcggtaagctgagatcacgccattgcactccagcctgggcaacaagatgaaactccatctcaaaaataataataataataataattaataataaataaataaatataatgcctcttctcagaccactaatttttaagaacatagtaaaagcaaaaagtctgcagacttgcagaacccagacaaacatgcagttcatagaaatacacatgaagtcattttcacagaggttatcattttatgctataatgaactgtgtcaagattatggtgaaaataaaaatgatagatgatataataatagattaaataaaacaattacattcatatagattcatggtccttgtggatggagacagcatgagtttcagatcttcaaaattggttgcttaacagcttgggaaatcggctgaataaagtaatataatagttctcattctgcaaaaccccaaaggccattgccacatagagtcacaccactatatatatatatatcctagaaaggacaacatgggttagttaagtgttctataaatggcctagagaaagctgaatgcttgctggacacccaggaacctcaccattttctgatctcagattttagctaaatgcccttaaaacatggcatctaaggaagccagaagctgatgtttctctttacggtggactctcttgggattccctatttctctgcttattcaagatctgttcgagttccacctcctccccatttgccttccatatcatctccagcccctgctatcatcctttgtctgaattctgctaatacatgttgtcatttagcacttaccttctgctcccttaactattatagtaagtaatgctgcctatcttcaaacctcagcctgcccatgcctgtgctctttctgctattaatgtactcaatctttctcgctgatgcaaaaacctaatctgatgatattcctacggtcaaccaagcacattccaagccctgatggtggttcaccaggagctcctgcagccacgtaagagggtatagaaagtgttatttccaagggagaggcccttctccattcctttgctatgagatggaatgcagttgtgatagctggagctggggcagctatcttggactccagcatgtaagatatgtgtttaaaatggtggagcaacaaagcagaaggagcctgggtccctgatgatcacggagcctcgttaccaggcctgagctacctaaattcaggtgagtgaaaaatacacttctattttgtttgagccactatttccttgagttttctgtcactcctagctatttatcaccctaatccacaccgtaactaattcaagtttttaaaatatacaccgtgagttaaaacacattcaacaaatttagctcagggactctctgctctatagcctgtaacggtgttagcatttttttaatctataagcactagaccatattttccttaaaaagctagagttatttctcatgtgatttcatatcctaggggacttgtacagagcctggatcaggggagcccaataaatctttgatgactatagaaagatatgtgttttacctccacaatgatatgcaagtacctaaaggtcagcaattttagtcatcagcatggctatacacagaaaaagtgcctcatatacctgttttgatattgctggcagattagatgtgttcatcctccctttctatcctcagaaaacagtatccaaaaattactttgcatacaatggcactatattatggaaggaaagcaatgtgccaaagttataaaatcatcgtgagatctaactacataggaaaattcgaacaacatctccattatttcactttacagcatagaataaccatgcgatttaattactctgccaactctgaaaaacctatagctgggttctggcacacaatgtacagtttttatatgaaaaaaatgataatttccctgacaaaaccacttagaatagctttcagaaaacatatgatcaaaatgcatgaaaaatttgtccccccaaatttactataaaattggcattgtatcttttacatcaacatgcaatacatactgtctatgctggacaacagagtaagaatagtaacttatttcagtggtttctgtgctgacttacatacagtagagattcactaaatattttttaacatataccaaaagtttgtatgattcaaaagttatttgaataatatcaaaagttatttgcaagtgataatataaagtttggatcagtcaatagtagtggtcctcaaccaggagcaattttgcttcccaagaaacctttggcaacttctagagatattttcagttgtcacaactggggaatgggtgggtgcttctggtatctagtgggtagaggccagggatgctgtttaacatcctacaatgcgcagaagagcccccacaacaaagaattttctggcccaatatgtcaacaatgtcaaggctgagaaactctggtcttacattggcttgaagcaatgcatattaaactcatagtaggcagggcaatgttgactttccaaatgacatagcaccttgagagttcaataaagatgaagagagtctatagttgttgacaatgacagtattcttagcttcttagcatagggaagcaaagaataaactgggtattcccaggttcgggtctcttgatcattccattaataacaatagtccttcatttccaccagtgaaggtgaaggtgtgagcaagttcaaggtagcaggtcctccaagatctcatcccatcttgtaagatctaaagattctataaaagcactcaacttttctttttagagatgtttttcgtttcagtgcagccgctactacaataactatcaccgttagcttgaaagagaaccagacataatggagggcaattattttctcctcttttacccacagctctccttcctccttcctccaaactactcccagtgccatgctatacacccccatcctgtgaccaggcctgcaggcccttctgttcccacagactctaccaagtttctcaggggatttatggtgacttatttaaatgcaactgatttgcccacaagggccaactcaaggaaaataatttccatcagccccatctttcctgagctttgtacacaagaacaccaaaaggcctttctttctttggaaaataagttccttttcctaattggagtcagttttactaatcaagattacaatgaggctttacaagcaacgttgaagaagggagcatttatgcaggtcagtaggggttttcctaaacattttgattacaactttaactgctctaaaacacatgtaaaactcctatcattaaatttaaacagcctgatgatatgccaaacaagactatgagaatggcaaataaattgctgtaatctgccatactgtcacttaccctgctcttgagcagctgtaattgactaataggataataaggtggcagtttacaaatctgaaagctatactcctttgttgagaatgcccttgagtgaaaaaaaaatgctctaagtcaggaagacagagtgggtgtgatcaaaatcatggccctggattcaatatatgtaaatatgcttttcctatgaactcaaaagaagtcactgaacacagttgtatgcaggggcagcaccacttgtcattgcgtttattgaacctttttatccctcctcacataaaaaatattcagaagagctttacccactctaaggaccaaggttaaaggcagcatcctaagcaggagtgagggcaagaaaggttttcttttttcttgctttttttttttttttttttgagacggaggcttgctctgtcgcccaggctggagtgcagtggcacgatctcggctcactgctacctctgcctcccgggttcaagcgattctcctgcttcagcctcctgagtagctgggattacaggcacaggctaccacacccggctaatttttgtatttttagtagaggcggggtttcaccatgttggtcaggctggtctcaaactcctgacctcgtgatccacccgcctcggcctcccaaagtgctgggattacaggcgtgagccaccgtgcccattcaagaaaggttttcttagcaccagtccactgatggtagaggttggctccatccttcttctgacagtggtttctgtttccagtttacctcctgagcattgaacatgcagagaaagattccaaacaccccagaactacacaggccactgctaagtgatgcttaaggacttgtcagcaaaggctccaatgcattcacctaggacaatgcccaaagtcaatgatctcacaaggatacatatgacatgaggattcttgccagcaaaagccagcttgaatctggtaagaaaactgctgctactacttctacttctactattgctgctgctgctgctgctgctgtttggagaatacttgtcaactgggagactgctgaggaagaagagggttgggaggtcgcatcaaactacagaaccctgtatgtcacagtgaggaatatggacattactgtgagtgagatggaaagccacagaggattttgagcagaggagagatatgagctgacttatcctttaaaaggattcccctggtggctgctgtgtggagaagagtttgtagttgggccaaggtgggaaatggaagcagggaagaagagagaggctattgccatggtccggtgagaggtaactgtggcttgcaccatagaagcagcagtggaggtggtaagaactggttgaatgctggatatatcttagagctacaatgaacaggatgtgcagatgagttggctgtatatgagagaaagaaaagagtcaaggacaacggcaaggttttggcctgaggaactcagagaaaaggctcgctttttactaagggggaaaactgcagaagcaacatattggggagggtgaagagacagaaatcaagaacttggttttgaatgttattccaaaatatcagcatgatcttctacatttaaaattgtgtttactgtttcatttctaaacattcctgagagagtagctgaaacattacagtacacattatatatgaatgtataggtatatgtgcgtgtgcacagaaggcaagaatggattgatggatgaataatcttccattcatactcttctttttctttccttgaacttatttctttcagaacagaaatatccacgatatgccatcatcttccttttccaagtgaactctctgctaaataaataacgaaaatattctaagtacaatcaagtaaaagaaaaacatgagcattttccaatctatcaacagatgaggcacagaaaagccatttggacagaagcaaaggtctccaagaacaacaaaagccacactgttaataccacagggttggataaacctgttccatgccaaggccatatggaaagcttacagggagaatggcacgaagaaacaaaaggcctttggaaacctctgaggattgctgggtgaaaatggaatttgggcagtgaggcaagaaggatccaggctgacctccatagggcacagtaacatcaattcaagatatttgcactcaagcaggctgctaaacccccgtgatgctgaacacttgagcttgtcccaatccctggtgccttccgcctttcgctgcagcctggactaaccacgctttgagcaagtgaaacgcttgccactgttgctgtacttctgagtcactgagatgagacagtgaccagtaacaagactccctccttgattaaatgaaatcaggttcctctaagtcctcaaggtctcgatcttacaagtccatccttgccagacccgttatcacctagttttagcaaaaatcttgttacatcacttgagaaagaatccccacgctggttatctcaccaaattcatcatctctcaccattccccaggtgagatctgatcaccctggcctgccttcagcacgactcctgttaggtctgtttagcaagaatcttccttacttctgatgctcccttttaggggctatctacccactgacccctaaccctgccttttggctacatatccccacttgttcaagtatgttcagaattgggcccctactgcaatagttcctgactaaaatctgtttttactactctaatcactctctggttttggtttttctttcttttcttttcttttctcttttcttttactttttttgttgttgttgagatgaggtctcgctatattgtccaggctggtcttgaacaactgagttcaagcaatccttctgccgcagcctcctgagtggctgagattacaggtgtgtttttctttgacaccagcagagtaaataccccttggaatatttccctccatgctggtcctgttggtgttgtgtatgaggctggtgtttgggcagcaagggagttgattacagcagaaggttcctaatcccacctctacttcacaacgctgttataatgaacagaatcagtccaaagagaaaacaatgaaaacgacagtcttacttgtacctatattcctagtatcacttgatcccccaacaccacccccatcagctccctgcctttaattcctctttaagtaacccgggagagatacgtccctttggggactgaatttaaagtgactatgaattagttatgccacatccttccaaccacaaccaggccctgtttaaaagcagagaatggacagtgtaagtgcctcttcccaagacagccacctctgccacttgtagttagagaggctgcgactgatctggactgcggcaaattaaatgtgttataggcaacacactctaaataaggccgcctcccttctcgcaatgtccagtttagtcctggcacctcatttgaggaggtgagggacagcaagaggaaatgacaggaagtgataaaggagctaaaaatagatgtggaaatgtgtagatatgagagtttcactgaatataaataggctgattagattaagcatcaactggcaaatacaatgtctataagcttctgggtttgctgtatcaaattgtcacaacctctgatgggtgaactaataatccactgtcaattcgatcatgatgtcatcttagatgacatgatcaaaatggtcgtgaaccagggaaggctgtgaagttacagtgagtgatttgataacatctggcttgcttgggctcggctctaatagggtctctgtggggtttacctctgatttggtaaaagcattctacaatccaaaaatatcaagcgttgtctacggacataaaccagtcatgaccataggagttataaacgggtttcaatgttttagttgacaaatgctgcaataactgctacactttattgggcacctgttctggccaggcattaggctaggacagaaagaatgaagacaatttgacaggcatggtcaatgcaattatattataaaacatagcagggccagcagagtccactcacagccagaaccctaagtagtttcaagcactcaaaaatcaaacagaaaacaacttcacgcaagactgaagggaagtcattaagacccatccaggtctgagtgttatacgaaaatgttactgtcgttaattaccttccaataataatgccaattacagaaaataatgagaatgtttacccaccaaactaatagggactggcatttcaaagtctaccagaataacctaggcaacaagaaatgttctgattctcccatgtctggatgtttttgctttttcttcctttcctgctgacccacttcaaaggtttcatgctggaaacactaatcatgtcctcctttgctggagtaagttaccctcctttttgctccctgcctagtgcctccgttcgcatccaaagtaacgctcattacctgcaaactcaaacttccagcagcccacatgcagatcccagcacacagatatatcattccacattggcctacctgatttacagatcacatgggtttctgaaatacagataaacgggcacttggggaaagcagtaatgttgtaaaacgtagagaaggtcatgcatgtatattttacctggaacctcacaagaattgataacatttgtgggatttcatttctacctacacagaaaacacatattctaagggtttaaacttgaaaactcacattcaggcacacatgcttatgcctgtctatggatgtgtgtgcatgtgtgcacatgcatgcacaaatcaagaagagtttctatttaaagacaacttgcaccaaaaaaatccagattactttacaatgcaaatcatcatcttttgtattttattacgagcttcctttagtatattaatttctaagcatctttaacacaaatcatcatatacatacaactctctctttcagattcagagaaggagttaaaaatcagccaaaaaagaaagcaaaaaacaatgaagataagggaggagggagtgtatatggagcaaaaggaggaagccagctggttagctggccttttaaaaggtatcagggaattaggcccaaggccattaatcctacagttttcactcctctgccaactctcacggcttacattaccgagccatcatccagattaaaaatgggtttccataagggtttctgcttccccaggaaccctcctctctaccctccccacctgctgccccttcacacagcagcaaagtgaaatccaaaagaaaaatattaaaatcaaacaaggctttagggatttggggaggtggatggagaacaggttcttatctaggctttagcacaatattccttcttcaaagtcttcttaattacattgagagaaagaacaagcgacaaacagaagagctgccttctaaattcagtgcccctcaatgaagggttcaggttcacaggttctagccctaagggagaatgatgatctgtgctcagcttcttgccacccagggtcccagccccccagcctctgcctccatgtttcccttcacccccacttgctcagcttcctccctgctctaagaagtgcccctacttgacagctattctgtccatggaatttccctgctgggcacctacattttatttttcaagtggaaagaatgcaaggttaaggactgtgtttctaagatcccaaagctgcagccagttaagaactgaataattcaaccagaactagttgttctgtccatactagctgcatgtggctttatcccctgtaacctagagcttgtagaaatgagaaaattaaaccatatccagcagggcacagagcgtgcacattgtccttccgagtagattcaaaaggagctggtagtcatgcatcagatggtgtggcagtcttactgttaagggacaagctaagggctgactgctctcccccacgagtggaagtgccaaagtgggtttatctttactgcaggtctcctgtgtgctggaatctgtgctaggcactgttcctgctttatttcaatgaacacttgtagcaatctgaaaggtcatattggctaaggacttgagctctggatctaaagcaggccttgttttcaatctcagattcagcactttccaagagtgtctttgtagcccattgccgggcttcttttctctttttttttttttttttttttgagacagagtctcgctctgtcgaccaggctggagtccaacggcccgatctcggttcacttcaacctctgcctcctgggttcaagcaattctcccgcctcagccttccgagtagctgggattacaggcgcgtacaaccacgcccagctaatttttgtatttttagtagagatgaggtttcgaggtttcaccatgttgcccaggctggttttgaactcctgggctcaagcgatctgccctcctcagcctcccaaaacggtcggattataggcgtgaaccaccgcacccagccgcctggaatttttaagcctcaagtttgttccactttgaatgcaagaagccacctcataggtaagaatattattgaacataaggcatggcacaaaatactttctaagtgattattgtccttgttatacccactttatagataaaagataaagtcatttgtccagaaggcaaagccaggagtggctacttaatttttcttgaccccaaagtgtatactctttccataacttcctgttgtctcccatggacccacctcaaaatcagaggtgtcacagtggtggtttaacaaccaaagtttcaaattagccatatacattctgggggcttccaagatcccatactggggtctccacccttatttccttgctctcagaagtaatgtgtgatgaacctgttctttggaggaagtaccttcctgtgggctggctggcacactgtcccaggcaaggccagcctggggatgttctagatgttcactcttttttctagtttcaatcctgcaaactcagtggacagaaggagctagggacttgaaagcatgaaagcattggattagaaagaaaactacaaatgcagtctgtgtaacagaatcatggtattttcatattgagaaggctctttttgattcagccattgtttagttagacctgtacaagttgaattcgaacttattttcccactgttacttttctaggtttggtaaaatgtgtgaatggctgtggatcccatgaaggtttttaagttagagcacaaaacgtcctaaaaagcacgtgactggccttgccaggcagagcaggatgtaaggaaaaaaaaacagaaactcagggaaatgcaagcatagattccaattctatttgttatcttgcagcaatgtatttatggtagatggtttccacattacctactaaacccagacggcaggaaaaaaaaaaaaatgaatgaacacagctcttccaagctaagaatatgactccaatcaggtcagtaaatagtcaggaaactacggttttatcaattcctgatttgttttgattcaaaacactgacccccaaatgcttcctttttttaccctctaaatctgaagctggtgaaaaatgaagtgattgataataaagctttcactacttccaaaagaaaaaaataaatgaaagcaatttgaataaagggccatttactctcctattctttgaatacatttattctatactgataagcacacatttacgctagagagaagatggtcttcagaataagcacttactaggattaaatttacattatctgtctaaatgcacacacattttagactggcagtagtatatgttgtgctcacattttgcaaacactggaaaggtgagtttttaaaaatacagttttacaactctagaagttgggagaaatataatttcctaatactagctataggaggaaaacagaaaagtgacctattttaatgacaaagcattcataatatatcttccccgtacttaagaaccagcttcatctcagcccatcaccagaaaggagagaaatctcgtgtataaataattaggcaatctcaaaatgagtctgcagatgctctgagataagcctgctgacaaagtcacaatgacagcttgctaacgtgttcacaggacatcagcttctcttaaaagctgctttcggaacgatcagctgggttcctactgagttaaaacacaagcattcggaggcagcttgtgttcaacagctacataaatctattaatccaactagaggggtgggggaaactgaagattacatctcaaaggccctcaaggcctgtgtttcaaggagtagcaagataaatgcaaccaatataaaataaagcttatcagttgttggtgttttagatgatgctacctttcagggctggggagtcaggaaagtacatgtctgagaaaaatgaccatatgtggcaacttgagcactgtttgccactgggcatcaaaatatcttaccgtgtgctcataagagtggatctaaactcaaactgtagttacatgagcaaaagagccccctgatgagctggtgaagttctccgttcaactacagcaaaatggactgagctcccatcacatgccaggtgttggtctaagagacggatttgccgaggtgactacacggaggtccctgccttccaggggcatgtgtcatggtgggaaatccaatgagaaaacagttcgcttccacacaatgtggtgggtacttaaagagaagtgttctgtgggagcccagagcagaaaagtcctgcctagaggtcaggaaagatgaccagaaatgacgcctgagctgactgatggtctggaagcacccagcgaagaagagcaatgatgtttgctaaggcaacgtcggtactgtttctccccaaaggcatgggattttatacacaccacctgcttttcatatagaaaactcatgaggaagctcctcacattgtttttaacagcaagttcaaaacaatcttattatatgattattgtctgccagagaacacctgggcatgaatgcttcctgagttcattccaattcatgactaagaacggtgggatacagcacagagccttagggctgatgccatgaaataaattcattgttggaggctgctgaccaccccaagtctaattctggggtaggtctccattctaccctgcaatcactcccctcactgacaaacgggctaagctgctatatttgccaagttgcagctaccaaagtaagtaaattcaatccttgggcttggagtcagcagaggcatggggccagccagagacccagcttccatagcacaggctgctgttcctaagccctctgctctcacaagcctgggtgccacacattcagcaataggaaatttgatggctcctgggactaagggtaaaaaaaggctgaagaaaagggaaaattaattttagcaaactagtagctaccatttattggtacttcttgatgctaagtgttttacattcttttcctcaagtaatcttggcacatctagggttcaagcactaagagcattctccaattcctaccaaggcagatacttgggtaaaccctgtacaaagtctcagtcttacatgaagcagagaggactcagtaaaaagttccagtaaagccagctttctggtctgcaagaaatgagatctagagtatcaaatccatcgttttccagggaccagagcactctttagaatacagtcatgagtcacttaacaatggggttacgttctaagaagtgcggtattaggagattttgctgttgagtgaatatcatagagtgtactcacgcagacctggatggtataaccttctacacacctagaatatatggtgtagcctgtatctcctagactacaaatctgtatatcacattactatgggcagttgtaacaccatggtaagtatttgtgtatcaacacatatctaaacatacaataggtacagtaaaaataggatataaaacataaaaaatggtacacctctgtgggccacttaaaatgaatagagcttgcaagactgggcactgctctgggtgagtgagtgctgagtaaacgcaaaggcctagggcatgactgtacactgttatagactttataaacactgtacactcaggctacactacatttattttaaatttttttcttttttcaataataacttagcttactgtaagttttttaccttagaaactttttaactttttgactcttttgtaataacacttagcttaaaacacaaacatattgtatatagctttacaaaaatattttctttcctttttcctttttttgttttgagacaggatgtcactctgtctcctaggctggagtgcagtagcacagtaacaactcactgcagcctcgacctcccaggctcaggtgatcctcctacctcagcctcccagggagcttggactacaggtatgcaccaccacacctggctaattttttgcatttttgatacagattaggtttcgccatgttattcaggctggtctcaaactcctgggctcaagcaatccacctgctttggcctctcaaagtgctgggattataggtgtgagccactgcgcccagcctataaacttttttctattttttttttttttacttgttcaacttttttgttaaaagccaaaacacaaacacacacattagcctagagcctacacagggtcagaatcatcagtatctctgtcttccatctccacatcttgtctcactggaaggtctctagggacaataacacgcatggagctgtcatctcctatgacaacaatgccttcttctgaaatatctcctgaaggacctgtctgaggctgttttacaggtaacttaaaaaaaaataagtagaatgagtgcactctaaaaataacaataaaaaaactatagtatagtaaatacgtaaaccagtaacatggtcatttattgtcattagcaagtactatgtactgtacataattgtatgtgctatactttcataaaactggcaatacagtagatttgtttataccagcatcaccacaaatgcgtgagtaatgcattgtgccaagacagtataacaggtatgatgccactagctaataggaatttctcagttccattaagatcttataagcccagcatcttctatgacgtcattgttgacttggccatgcattgttataattagctcacaccagcacttttatggcttcccaggcaaacaaaataaatggcaaaacatattaggaaaacaatataatgacctgctacaacctccagtaaccctgtgcaaagaggaaagaggatccaagggtgaaaaactaacatattaggcatcttcttccattcatttttttcactttctcctctatgcctgccaaggaaaaactcagattcttgatttaacacacattatcttcaaatagaatccttatcgttgtcagacaatgagaggaatgttgcaaatacatccaacaatctgggtataaggaatttctttctttagctccttagatgttcttgattttcccatcaaatctctaaccttacaaagaaaagttgttttctttttattccacggacaggcatgattctgagaattctgcgtgttactaccaagctccacaacctacactgtcataaatcattcattcactccatctgtatttatgaagctcttaatatggacacaacattgtttttgtttagatctgtgcccagcacaagggaagcatgagaccatgcatctggtctttctggtacttcctcatttgaggagcattttattatatccagctatatttgaaggttcaaactaagaagacgaaatagcaagttgctaaggtaaaacccccaatgcctttgaagattttaaggaaaagaacagggagagaggaggagtgttacttgactctaatgccagtttagctccatggattgcccagacatttgcagaacacaactctttggtgagccaaaacacccaggtaaatgaagggagaaaagaaaatactctcattttccacttaaaaactctatgtttattgttaatgtattagaacattgtataagtttcccaaagtggcagatcacccctgagttagaatcaactcttaaaataaaacacacgtacatttaaagatttatcatggattcaactaaacatgaattaatatggcattccagaaaggagtcagacagtattaaaaattattttcagtctccaatgattaaactcccattttcctcctttttcttcagtcttgcttgcccagagaaattagtcctacaacaacttgccacagacagtctttatcaaaatatcaaattaaatggcgcctctaatcaggaatgtacggacaggctcaataccaacatgttagtgttactgggtttgaaaaaacatgagaaataactaaaaataatgaatcaggccttcagccaaaaaatccgaactataaaggatgttctaatggcagaagctgggaacagtcaaattcttagatgcacttctcttgaacttcatttgtgccaattctcagagaatttgtaaagtatttcttaggaacacgcgttactcaagagacagtaactgacctgaagttcttaaaatttgttctttaattaactagaacataaagaatgtgtcttatcttcaggaacttctggttctgctaagaaaatcagttgcaacagcttcaagctaacagtgatactaaacatggctgcaaagaccagctcttaaggataactggaaacgtgagaataacttctcaaatatgaaactttgtcctatttccaggactacaattatctggaatccaatttctttttctaaaaaagaaagggaaataaaaagcagttcctataacaaacctgatgtgcctatgtccttcttagtttagttttatttttaagcatgcaaacttatgtttaacaaagaatgaaggtaaacgcaggcagctatggtgtattttaaggaaaaatggatgagtataaggaagtctaccatttactagattgtatattactttaggtaagtcactttaaggcataaacatacctattgctttatgtgtaaaatgagaatatttgtgaagattgaaatgggtatgttctttaaaatatcataggagccggtactttgtagttatatatgataaatgctaggatgtgacttaatatagaattaaattgacactcatgattcatgtcactcttacatttaccctcttataactcaagtgattcccagaagaggggtacacctcagggtactacctgccccccaacaccaggtggcttcatgaaaattcttgggactaaattatattatcaagaagtccaagagaatgctttagctggaaaaagtggggtggtggggagaaggttggggagagggaagtaggagagagagagaaagaaggacagagaaattggaaaaaaaaaagtgtgaagaaaaaaaaaattaccctgtggttagtttctactcactttaagaaagtgaaggatttactctaggaagtggtaacaaagggtgtgctcactttgtgaaaactggtcaagctggacatttaagatgtgtgaactttttttggatatatattatgcctcaattaaaaaagctgactttaaatgtgtctttcaaaaaagaactaaaagaacattccatttctagctctgagcaaagaaaaaaattaaatcaaaaagacctataaatataccacttgatcaaagtgtacttataggaactctggtgaaaagaagccagaattccaagtgggagagacctagattcaaatctagctctgttggctgaccgtgggcaagctgacattcctgagccttggtttttctcttctgtataatggagtaaagagtaacttccttcaagaggcacgtaggtaccaacaagtattattcccttccccattcctactctgctctgaaaaatcatcaaggtcagagtccacaccaagtcctgttgttttaatatggtgcctggcacatggggggcagcttgataaaactttgtagaagggggaggcggaggttgcagtgacctgaaatcgtaccactgcactccagcctggtgacagagcgagactgtctcaaaaaaaccaaaacaggccaggcgtggtggctcacgcctgtaatcccagcactttgggaggccgaggcgggtggatcacgaggtcaggagatcgagatcatcctggctaacacggtgaaagcccgtctgtactaaaaacacaaaaaattagccgggcgtggtggcgggcgcctgcagtcccagctactcgggaggctgaggcaggacaatggcgtgaacccgggaggcggagcttgcagtgagccgagatcgcgccactgcagtccaacctgggagaagagcgagactccgtctcaaaaaaacaaaacaaaaaacactttgtggaatgaaagaccagatttttaccttctagggacctataatctcgaacggagtcagaagaaaaagaccatgaaaaaaatccatcacttccaagcccctccgcttgctgatggctcccatttctcccaatcacaaataatctctcccaacaggctgtggtactgagatttctttaaaaaggctacacttcctgctatttgcttttgcttacataaaaccaactctgcttcctcattctttagtatccctgatttgcatgactcttggcttggtattctatccctcgtatttcttacagcagttgtttgaccattcctcaccattcaaggtcttatttcacttaacactttaactttgaacatgtgttactttcacagcatctctcacaaggcaaatgctcaaatttaattttgattgatttaattcttggaacacaagttcggaacccatctaaatactagcttatgttaagtctctacccaactagtttcatgtaaggagaatatacaaaccaggaatagcaataatgataataagactgatgcctgtgacagactaaagtaatagatttatttcccattcaatttaggaacccttagaattcttctaacacagcagtccaggaagccactaccaatcaatctaagttgccatcagttgaaatctattagtcattcccaggaataaatatcctccagtatgacagctctccaacaccttatgacctcagaaaatgtatcccaaatctgtcttaacacatgcaatgtttcctacgaaattccttaaagcacagaattcataccctgtatcttaaacttctaacacacaactagtatactcaaaaccgaaagatgatgtacatcatgaacacttgaaaaattcacgaattaaaaatgtcttacagggaaagcagttgtctccttgggaaagaatggtgtatggtttacacctattttaaggagaatgatggtggcatgagcaggtgtcagatctcagagcagaaggcagaggtcttgtcatacaggtcttactccaccccacaaaccccatccaatattgcttgactaatttggaatggctattactcaacatttggagaatcagaattccaagcagagaaagcaaacaagaaaaaaggaacagtttgctgtagcatatctccctcaccccacgaaattaagatggcccaaaccatggctgaccatgcacattcacttacatacagccctgacttctctataaaggatgtagctttcctcaaggtatcccttcttccttttctccatcccccaaacaattctcagatcaaacaacaaagctgcctctgcaaagtctactaatatcctgattattctccaaacataaaaaggtgaaaatgaattgttagtcttttaataacgaatgcaatcagtccatctaagagtttagcaattttccctaacaacatacttctctccaccctcacccttacttttctgagctttcaaacactgtgaaacatttgctctaggtacctagcatcagagccttgcacaaagggttggagagaacaatcgacaaagcctctatctgtttcatcatgatggttccccttactaataggaagtgtgcttcctgtccatcctttgacttttgctgtcagtgggaaccctattgccttaaaataacattctgaattcacctgcttactgttgagcacgctaacactttcagtagtgacacttaaaaatggaaagttccattaattgttaataatggaaaatgagatactctgaattaggaatatgctctcactttgctgtttattatagctatcagttctgccatattatatatgaattcataaattatgctgtgagatttactctcataccacattgaacttggtaagaatctattctaggtcttcctgattaaattcacatttaaaaaaaaaattaatgggtaagtatttatccactattaggaaactctcactttttgaagcgatctataaagtctagtaatcagcctgtgagcaagttcaggtatttataagcctataaaatacacctgccacatgtgggtttttacacttgaacagtaagatggcattggctctgcaatatttttgaaaaagccaaatacctacctcttcatcacttgtaaaattaaagggcaatcgtaaacatcggatacatttctatttcttaaataggatctaaagtttaaagaaacagctttctggctcattttagccaaacattaaagtttcactaatttaggtaacattcatttggtatccaaaaatgagcataaatactgtgtgctggaaaaaaactctttaagcaaacaaatgctatcagtaatacaggattaagggggatgatatatgttccctcaaaagaattatttcccaaaactgcatttacaaagaataaatgaaacttaaaactattctgtatctcttacaaatcagtctcttaaaaactcattttacaatagggtcagacaatgataaaaacttagaactgctggtcatggtgtctcatgcctgtaatcacagcactttgggaggctgaggcaggaagatcacctgaggtcaggagttcaagaccagcctgggcaacatggtgaaaccccacctctactaaaaatacaaaaattagctaggcatggtggtgtatgcctgtagtcccagctactcaggaggctgaggcaggagaatcacttgaactcgggaggcagaggttgcagtgagccaagatcgtgtcactgcactccagcccgggcaacagagcgagacaccatctcaaaacaaaaacaaaaacaaaaaaaaccaacaaaaaacaaaaacaaaacacacacacacaaaacaacttggaactagctgggtaaagaatatagtggcctaaggaaatcgttattagccccaatttataaacaattaaattgatgacagaaagaggagcaggtggcttcttgcattcaaagtggaacaaacttgaggcttaaaaattccaggcggctgggtgcggtggttcacgcctataatccgaccgttttgggaggctgaggagggcagatcgcttgagcccaggagttcaaaaccagcctgggcaacatggtgaaacctcgaaacctcatctctactaaaaatacaaaaattagctgggcgtggttgtacgcgcctgtaatcccagctactcggaaggctgaggcaggagaattgcttgaacccaggaggcagaggttgaagtgaaccgagatcgggccgttggactccagcctggtcgacagagcgagactctgtctcaaaaaaaaaagagaaaagctgctatagatgaataacttggtgtcatggctaaaaaagaacaataattgcaacctattctaaactaagagtaagacattgagaaatgccaaatcaggcccttcagttgcaattggaaatttaaaactatgtttttcatttacaagaaagaaaattcacttctagcatgttatctttatcatcatattaggccatattgtagatgagaacactggagtttaaagagatcaaatagtatgtaataaaaggagaaccaacatcttttaaaaactgtaaatgtatgtgatcctgtttgtggaccagcagagattatgctagtttgatttagtgaactgtgtgaataatgaataaattcaaaaaatatgtatttttttgttcccatgttttttatatttatttcaagtttacaatacaagcagatttaagctgagcaagggttccttgagaaggagggcccgacatggatctgaaagctggtgctattaatagtttgaaaagaaacaaaatcatagttggatggtacatgcatttgccatcatttattgtcatcattcattgccaccatttcccagttcatttcctggaaatcctgctgcagaaaaggttgtaaattaatttttttttatttttattttttagatggagtctcgctctgtcacccagatgggagtacaatggtgcaatctcagctcactgcaacctccgcctcccaggttcaagcgattctcctgcctcagcctcccaagtagctgggattactgttgtgcactgccatgcccagctaatttttgtatttttagtagagacggggtttcaccgtgttggccaaactggccttgaactcctgacttcaagtggtccacccgtgccggcctcccaaagcgttgggattacaggcataagccaccgcaccagcattaattcttttacaagctgtccaggatgggccctaatacactatccccatgataagcataacttgcattccatttcctctaataagggtgtctccacagtggattaaatgcctcagccagatgcacaatagactagtcatcattttcacaagctccagttaaaccacacgagtaagggcataggaggtcaaagggggctgctgatgatgaagaaaccgggctgccaggaggaaggcaaataagagcaagagtgttttccactagtaggtcaccttacagatactgacatatctgtctcctggctaggcactccttcctctccaccactccaggaaagatggtccacccggtgtgggatccaaccacagcttacagacacaacaaaaacttcctgtgagagcttgagactgccgaaaacacatctagttttgctttattcttgctacttggaactacagcctgggaacagatacactgaattactgcgacagccagagagaaaatcatgaaataggaggagggaggaagaagagtcaactgggaaaagggaaaggaaattaaatgaacagagaatcaattatatgtgagcctgtctctgcttcatatgttatacaatttaagcaccaagtgtcattgtcctcatttcacatatgagttgacgga

SEQ ID NO: 31 - DNA, 207600 bp, Homo sapiens
ggcacacagagcagttgtgtggggcaggttttcatgaataaataaatccccttcacttttcagttctttgaagtgtgaagcaaaaccaaatgcctgaagccattacagtccacgtgggccatggccacgaagttctaccctgtatgccactgccttggcgattcagtgccctatttttaaaacgaagagacactttattcatcaaaatccaaacttgatacctgcagggaatgggacagaattatttcctaggaaagagacctactcagccaagaaaaactacacttccaaagtccctatccagagttttctccacgaagcttccacagactaatgccatcacatgtgactttttttctcacactgaagtatcttggcacatttacacagcccacatcacatgagccctcacttatttatatgctgccttagcatcatgtccactaagggtaacctcattagaacaaaagatagttgatcacccaggaaattgcaagggatttgggagctctgtgtaagatattctcctccaactccaatgcagacacagtgattatggaaaactcattctgcagtcataacacctcacacaatgtgaacacacaccaggcactcagtaagtgcttgttatgttttatttctaggaaaagtttttactccttacacctccactactgggaggaggagagaccaaatctatgccaaaaaacaggtaaaagtccaactcacttccagaaagggaatgaaacaaaatttccaagaaataccatctacagaataataacaatattggccacgtggagctttccatgatctcatcaactctttttaagtctattaaaagtcaatatataccttatttacatcagctcattgtgtagagttgtgatcttaattggcccttcaaaaattctgctttgccagtgtctctttcttaccttaagataatcgcagttaaacatcagggttacgtataacgccgactgaaatggattttttgttcccctttagctaacattttctgtaccttactatgttatagcaactatacaaaactacttttgtgatctctttcagtgtcaaaataacaccacaaacttgttcttctatgatctcattttatagttgataaaatggagagtcagagaaggtaagtcacacagttaatggttgatcaaaccagaactgctgcccccatggctcatatagtgaaccaagggtcagaaaacctagacctgtgggccaaatccagcctgaaatgtttttggtcttctttatgatttttttttttttgagacggagttttactcttgttgcccaggctggagtgcaatggcacgatcatagctcattgcaaccgccacctcccgggttcaagcgattctcctgcctcaacctcctgagtagctgggattacaggagtgcgccatcatgcctggctaattttgtatttttagtagagacgaggtttctccatgttggccaggctggtctcgaactcccaacctcaggtgatctgcctgcctcggtctcccaaagtgctgggattacaggtgtgagccaccgtgcgcggctgattttattttttatagagacaaggtcttactctattacccaggctggtcgaaaactcgtgggctcaagccgttctccagtctcggtctcccgagtagctgggactacaggcgccccaccgcatgcttttgtaaacaaagttttattggaacatagctcatttgtttacatattgtctacagctgctatcctcttacaagcgttgactagctgtgacagagaatgtatgtgcaaaacctaaagcatttactatctggcgcttcacagaaaaagtttgccaacctctagtcgatactatataagcaaagataagacgtaagtctcagcaaccttctaaaaggctcaaccatatcgtacacaaagtacagtgctttcaacaaaacaaaagctttctaatgaccttaaaactctagagtaggaacagtccttgccagtcatctaccttctgtttctgaattctgagtcgagcccagcgttagtaaatgtctcattactctaactcccacttagaaataaatatactcaggatattagaaatatttattgctcgcagaactgtctggtaataaagaaactgccccatcactcaaacagcaatagaagatttatcgatttcctatgcaaagtattctacttagacctaaacaaactaggggaagaaagcacaagttcaacataaaagacagatgggatggtagcagtggtgtgagcctttcttcattcacgctctcaaaccagtaaaagttagatatagagaggtccctcatccccaaatgtgcaatctggggcatgtgcgtattaacaacatagaatgtggcactgcattgcttgcaatgaaggctgcaatataactttacccaaaacctaattcatcatccttttccctttaacaatcagcctcttctatgtcatccatcgtgaatgttaccaccaagactagaagcttccatcaccaccctcctcccacctgccaccacatatacataatacgtatctgagtcctcacaccaaatgccttcctctttctattgcagctgccttcttactagataagggtcccgggctctctggatggactggatgtcttttttttttcttttcttttttgagacagagtctcactccatcacccaggctggagtgcagtggcatgatctcagctcactgcaaccttcaactcccaggttgaagcgattctcatgcctcagcctcctgagtagctgaaattagaggcacatatcaccacacacagctaatttttgtatttttagtagagacagggtttcaccatgttggccaggctggtctcaaactcctggcctcaagtgatccgccagcctcagcctcttaaagtgctgggattgcaggcatgagccaccgtgcccagcctagatgtctttttttttttttctttttgcctaactagggtcttggggtatcaatgtctcccactccatttcctgctcatcttccaggactgggtctagtttcccattcacacacctctgtggctcctccctggttacctaattcttgactctgtcaatttaaggagcagcagataaggcttagtaacttactattgatgttttggatccatgagcatcagctaaggcctgctggaaagcttcaggcaacgcacagagcacagcagctcaccaggactgaccctcacactgggcccggtggtgtgcactccaccagcactaactcgtcatgtctctcatcaaaaaatttggcatgtccactgtgccaacaaagtcctggagaccaggagggctcaagcactggccagagttctgtgggtaggaagcggtggggcaggaactcaaaccaaggcagtgactgcagagctcacacttcacaccacctcactctgcctctgctgcctctgaattccctaatactttgtattcctctgaagtgacttttagaaaattaaacctagaattacatttatatacttcccttctaaaattgaaaactcctggagggtagtggtctagttttattaatctgtaaacctccccaaatacccaacctggtacccagctggaactaaatgacgaacaaaggggtagtccctcctccaggaagtataatggaagaatgaaaaagaaaagatcgtgcagaaaatccatcaacagaatacccctatggggtctttctttgtggtctgtttataccccaacatatattcaccaagacttcctgaaaataattttgaagaaacaaagaccatgaaaaattagctgccagatttggaatggtgtgtttctgtggaggaggggcaggaactaaaggaatggccacatagagcgaccagatttcctaaggagggtaattcattttactccaaaaatggggtaaagcagtggttctcagtctggctgtgcattaaaatcgcctggggaagttttaaaaatcgccatgcccaagccaactaaatccaactccaggggagggtccaggcaagtgtgttttctgaggtaagaagagctggagtgaaggaacctgcattggaattctgactccactaattactaataacgtgaccttgggcaagatactcccctccatgcatcctttttcttcagcccagaacaatcccttactagctatgtgaccttgcagctcagtttcctttcgtgtaaaatggaaatcataatagtacttaaccctcttaggtttattttaagcactaaataaggatacatcaaagttcttagaacagggcccaggacatagagagcactcaatcaacgttagctacttttatcatcaaaggtacagtgagtttacaatacttgcctcccaagctaaggactaaatacaaagtacttgatataaaaagtacctaataaatggtgctctcttttcccatccatacatctcactcacaattatctctgaatatgtgatcgaacctgaaggccttcaggatagagaaaactaattccccaacactcacttggggatgccagataaaatacagagcatacttaatacgaaaaaatatctgctatttatctgaaattgaaatttaactggatgccccatagttctctttgctaaatctggcaaccctacattcacctgtcacctacatttaggctacaagtaaagtgggaggcagagtctagtccatggaggcaccacaatcaatcaatcaatcaattaatcaatcaatacctagcatggtgatgcacacctgtaatctcaagctggagaattgcttgaatccgggaggcagaggttgcagtgagcagagatcataccactgcactctggcctggacaacagaacaagaattaatattaaaaaaaaaaaaaatcagtacctgggaactccctaggtttgctccctggaagccataagacatcttactacaattcataagcagctctccagccttcctacatagggcaagtcaatgcattgttcagatgaacaaaacacaggaggaaactactcaaaggcaacagagggcaagaagagagaaacctttcctaaagtgacctctccattttgcagtcacttatcaaacacctaaatcaagtgaacaggaagatttgaacagaaacctttgcctcctggtggaacacacactccaaccatcccacaaggcaaaagcctggctataaattatttagccctataaaagatcaataccaaaacccaaagccatgttataggcttcaaaagtcctatgccagataggtctctaaggtatcacctgtttatttgttgttgttgttaattttattttaaccctccctttccaaaaaagctaagtttattttaccctttcaaatcaattttttttcccattagaagaaaggcagaaataacagacccatcagaaaaacaacattccagaaacctattttagagggtatttactttgcattcccagagcaagatccctggagaaatgttaagttttgaactatgtctactataatatttgtatatgtgtaaaaaactgaagattaaaaatatagaagttaagaagcattaagagccaatgagtcagccagatctatgagtggaattaaattagcactagattgttcactgattatcacaaacagtgaaagctctcctgcaaagacatgttttccagttcacttggttaatcccttctgaacaaggatccaaggaatgaatattatctatccaatggcaagctacacaaattaatcacacccaagcaccatgctgacagccaaacacaatctataaaattccagactatcgtcataagccaataacaagaactaaagctctgatacccactccccccagaagaaatcccaaattgtaaaaggtttgaaatgacactcccacatccatttacagccaactatttcagactggttagatcacataaaaatatttttaaaagaaaaaaaacaggtagaagttaattttttctttatatatatttcaatggctacaaaataagctaattttttaacagcaagaaaattaaaaaggcaaatgggcatatcattcatggatttgtgcaaaattcacattaaaacccacactgcaataataagcacatagcatcagcataatctccagtttacttagctgtgctaccacatatattagtaacctaaatgtaacctataagtgggtttgttgatttttttctacaaacagcagaaactaactcattttcctgaataagcagcagattcagacagcaacccacagaacccagaatttgttggcaaagctccgactttgcaaggtggctaataacacatggaaaagagacagcacaaagggaaagggggccagaaggacaagaaatgccccattcatggtgccctgcatccctggcacggtctatttgaatgctgctcttatgaggctgccagctttgaaagtaaaaaagagaaaaaaaatatgtgtaacttaagtcagaaagaagggagttctctgtttgctgttcttgctaagagactaaagaagacattgccaataaaccttcatcttcacgcagggaagctttttctttctttctggccaagggaagattcagtttagaaagcaaccacatcagcttaacaagaagtgtgttaatgggggaaaaaccacagttctgaagctggcgaaggcagccccacgaccgccagggctccctcgctgactgtctcggaggcacaggctgcacagggctcaaaatgtcacctgtgaacccctccagcagaagtcactgctctgtgttactctcatggagcaatttctctgaagttcccccaaatgatgattgcctggtgtgtccttcttttattcaaggtcaagaccaattctatatacccattcaccttaaggtaaaatgacatttcacagggctaaacgccaccagtttatggaggaaaagacactaaataaaggaaggtagagagagagagacatgggtttttgtctctccggctattgtcagacttgcaaagggtatttttcactccagttctgtgtgaacagaggacctgaggtaaggcaatgaacccgaaatatttgtaacctggagagggaaagataccagcactggctgaatatctgtgaggtatttggcagcatgctatacatgtatagatgctttacactcattatctcatttcgtcctcacccaaaccttctaaggtggaataataatgtgtaatagttgcagctctgaggaaaccaagacataacatggactctgtactgcctgattctaaaggctgtgctctttctattactgatgattattcattttcgatctgcctcccagcaggggtcggcaaacttttctgtgtagagtcagagagtaaacgttttgggctttacaagccatatggtctctcttgcaagtactcaattctgccattgtagcaggagagtggccagagacaggaagtaaatgaattgagtgtggctgtattccaataaaactttatttatgaacactgacatttgattttcatataattttcacatgtcataaagtactattcttcttttgatttttttaaccacttaaaaatgtgaaagccattcttagcccacagactctaatttgccacaccaggtctacaccatccataaataatatcttgattaatcttggagggaactaaagaagaagaaagatgatattgctctaagaattagaaggtggagggaggtgttctgtgctatttaatgtattttagatccttattcccatttcattataggacataagttttctccatcacacctcacagaaagaatgggaaaaaaagaatccctgctattaacatcagcagagaaggtataatccatacacacaaatatagtgatgttttggccaggtgtagtggctcacgtctataatcccagcactttgggaagccgaggtgggtggatcacttgagcccaggagtttgagaccagcctggccaacatggcaaaactccatctctaccaaaaatataaaaaattgacagggcacggtggcatgcccctgtagtcccagctaatcaggaggctgagaggcgggtggatcactggagctcggaggtcgaggctgcagtgagccatgatggtaccactgcacaccagcctgggtgacagagcaagatcctatctcaaaaaaacaaaacaaaaggaatgttttgagtaaattcagtttacatattagcatatgattttgaaatttatccttttattctcgctataaaacatcctataaattcagtttgcatcctgtgcctttcagttaaacaaaaattgaataaagccagttttaaaaaagtcacaaaagttgaagaagaattgatgggccagggaaaacacaaagtaaagagaaagtcctggcaaccctggccagggatcagtgagacacaggaacatctttccaagctgtcaatgacaggctgatttactaattttagagtatggaggtacagagttaacttaccaactaatcaatgtgttttctcccttgactgtttccaaacacggagtgctggtcagttgcttcaggtaaacccaatcagctataaacactacgctaacaatatcgtaagatcaatcaagcactaaattgctcctgaaaatatactgtctcttctggctttatttccccacctggctggactactgttttctgctgtgcatctccagcataaagcataacctcattttgaagtcaggcgtggccttgctattggcctttgaaagggggttaccatactgcacacttcctaaaaagtaaaagtcggcaagggtgtggaagcatttctaagtgtcaaagacacctttgagagtaacagatgaactagacttagaagctgggagtctttgccctcttcatgcccttttacgttaaggtcatcatgtcaactaaaccttagcattttccaatctttaataaatgggaaggggagctgaacgcaaacatgattaaaaccacttcctagaactcagaggtgaaggcaccacaaaacattggctagtaggcaatatgatggattgttatcttttgtcaatcaacttgaaatgtttaggaaagactgtcaaaaaattcttaaaacatttcctcataatatagttggatttttaaaatctttgtactctttatttcaatgaataggcctgaatgacaaaatatggataaacattttgtttttacttcagtgtctgttattctattctagttttgttttatggttacttgtatttctatcatttttctcattccagtcctaacagcagtacatttaacaagaatgccaaatgaacctgaactgctggaaggattttacatacttgtaagacaactgggctaatgtgggcatcatagtcacagaatgatatgtgcaaggccatagaagaagctccaaatctaagaggtaaaaaaacaaacaaatgaaaaactttaaaccccatttaatagccacctctccaaaagaagtactagtccaaatgattcttgctttgttctgaaacatttccagtgatgttccaaagcagcataggttcattagatcaggtgagtaaggaaagttaacaagaagcaaacgttattaaatagcctctgtttaggatagaggaggcccatctgtctgcagtgaaggcaacacaagagcttacaaataatctgccttccccaaggtacatggctccaggacacctcctttgtgtgcttggaatgtgaagaatttaggagacaatcctagactgttgcagtgttgggggatccttgtttgaattggggacacaatgcagccggctgccactcatgaccttgataagccaatgcattcatcactctgccagtctccatgctggtctcaccatcatcagagtggtggggaggaaatcctaatttgttgaagcctgacacatccctagtagcatctcctaagcagcttctaaaataatctgttgtaaaagcagcagaatgcttgggttggagaatggtcacaaactggctatgacacgaggtctcaagtgtcactgaaaagtcccattgaaatggaggtcggttctaagcccttttgtggtctgtggtggtcgttcagtgccaagaagagggagatgacccttcggccaatgtccctctcaggagttcctttacagcacaccacgactcccttcagtaacatccacttcatgcccttgatatccttttcttctgctctgttcaaaaagacttcacttttacattataatctgaagatctttcagtgggcccagagaaaaagaatcaactcagggacaaagtacattttccacattgatctttcaatagcctcatgtctgactaattttttaacgggtcttttcaaaagatgggtcctttaaaaaacaactcaagagagctagagacaggaagatccccttttcttcaaagtctttccaataaaggaggagtaatgctgttttctttaagcaaataatcggtggcctcagttacaatttaacttactgatttaaggtaggtgcaattattgcccccattttacacatgagggagctgaagtacaacaggttatttgccaaagaccatacagcttataagtggccttgctgtcaatgctctgaaccatgttacttctgctacacctctataattagagcagttcattctattattttaaatgaactccactcctttctcccttccaacactgaaatgaaaatctcatcttcactgatgcttagtctaattactaaagcagtggtcttcagtgaccccaccaaggcacatctggcagtcaggagatatttttgactgtcatgtgtatgggggtgaagaatgctacctactggcatccagtgggtggaggccagggatgctgttaaacatcctataatgtacagggcaagtctccatgacacagagtcatccagaccacaatatcaataatgctgaacagtcagataagtattttcatgacacaggtcttcctccctccattgctcttctcatttctaccattttcaccatagcaatggtctgttgagtatttgtgccccaaactagctaggaagccatctttcctagtaagtaggatttcttgcccttcccctacctgatctcccctacttcctcaagaaacctaacagatttatgtagtcccatttctgcactttgagtcaaaccattccacttcatgtaactcctatacagtcttccaagcctattccaagtgaagttttgcctgagaaggccagtccacagcaactacatcctcctcctggaatctgaacttccagttttgcaattaaagtgatgataataatcgctgccactgcattcctaccatgtgccccacactttggccaagcatttgatacatattattgctaatccttcaaacgaccctaaaataaagatactgccatctccatttttccctaggactaaagagaagctaagagaaggtaaaggagttcaaaagctttaacccaaggagtgggaaaaccaggattgaaacccacatcagactaactccagagcccagctctttccaaatgggtcccactaccaggcacagttaagctcacatacatctctcattctctcaaagtacctggaagaatttcaataaatacctgttgactgactgatcaaacaataataacctctctggggttccgaggccgctctgagagtgagcctctcattgtacaatttctcttttattactcccacacattaatgggtcattctccttgccttcccttactgtatgtatatgtatatatatatatataaattttttaacagctttatggagctataattgatatgcgataaattgcacattggtaaactgtatattttgataagtttgacatgcatatgcactcatgcatccacttccaatattaagttaataaaatacccatcactctttaaagtttttgcactctcttttccttaccatccactccaaccattgtactgcaaccactaatctgtctcctgtcattgtacattaatttgcatctcctagaagtctgtataaatggcatcctataacctatacattctttcttctctggcttcttcactcagcatattttgggatcatccatgtcagcatgtatcaatagtttgttctcttttattgctgaatattattccactgcatggatatagcacagtctactcatccattcacctctgatgggcatctgcgttgtttccagtttgtggctactataaataaagctgctgtgaacacgtgtagacaaatcaccattctctttaaaatccacctctatctgaagaagaattttgccagatcatacagctgtattaaattttgaacggtttttccagtataaagaaatggagatgagaaacaaaacctcattctctttttgaatgcataccagggcatggttttccaggacagatggctggtcttgtcatttggacccatcccttgataataactaagtctaatttcagtttccttatgtataaaatcaatataatagagcctccttcatagggctattgggaagattaaatgattattattattctcgcaaaatcttaatctcaaaccagtgtgtggcgagtgcttaataaatatgggctatgattactattaatcttaacatctattatgaaaaatgattaaccctcattatgccttcaaacagaaattcctatgatttctgccaaatttctctattcagattttaccttaagtgaccattctaccactatgacatcatatagcaaacaaatgatggtctaacacagggatgtccaatcttttggcttccctgggccacactggaagaagaactgtcttgggctacacataaaatacattaacacttgtgatagctgatgagctaggaaaaaaaaaatcacagaaaatatcataatgttttttaaaagtttacgaatttgtgttgggttgcattcaaagccattctgtgctgcaggtggcccacaggccacaggttggacaaacttggtctaacacaatgcttctcaaacctttttgaaaccctgccccctttagaaaaacaaaaatatatatacatcttgaaagaattgacacatggtgcctaaaaacacaccaatataacctttcccctgggtctaacaggacagcactagtgagaacatgctgcagtcttctaactagcagctccctgtgaatcatctgattactcattcatcagagagaaggaaatgaatggactcagtgaaacccaactagtttccaggaagcctgtgataaacatcccccctaccccggcttacattgcatcttaccacttactacctatcaggcccctaagatctaccccttgtattttcacacatgcgggcaagtctgaaaagggaccgtttgaaagagaagtacttggccctgggtgaaggagagaaaggtctgtaattcaagcctgggtgaccatccatgaggaaggctaggaaggagcctagtgctggggggtcctctggcctagacagtaagcttcccacaaaaagatggcaggtgtgataactagacatacacattatcagaagaacgctttgacaaggcaaattgtcaaggagttctaccagagaagagagcctggaagagaactttatgtatctttccaaccacagctgggaatgaagggcctggtgggcttggaaagcatagcttaagagcacaggatgacgactcagtcagacttaggagaacaactcctcacaaccaactatgccattaccaaaaagccatggaggtgtgacttggtttcctaaacacaggccctgggatacaggacaggaacgtcctccaggatgctcttccttatgatgatcataggtgaacacagacacgaaggacaggactgctctcctcctccaccccaaatcactgccctctctaaaaagcctttcctaaccctcatcacataatagatgctcaacagttatgtgctgaattgtgattggttaattcgtgaatgttcaacttccattcttatgttctacacctgggccataacaagtctcctaagagccttgaaaaggcagtcttggccaggcgcaatggctcacatctgtaatcccaacactttgggaggccgaggcaggtggatcacctgaggtcaggatttcaagactagcctggtcaacatggtgaaaccccaactctactaaaaatacaaaaaattagccgggtgtgatggctgatgccataatcccagcgactcagagggctgaggcaagggaatcacttgaacccaggagggaggcaaaggttgcagtgagccaagatcaggccatggcactccagcatgggcaacaagagcgaaactccatcttaatttaaaaaaaaagaaaaagaaaaagaagaaagaaaaggcagtcttcccactaagtagctaggattgttaagcactccagtcagtgcctaacatattgaggggttcaaaaaatgtctggtctctttaaaaaaaaaatctaaagtgaggctgggcgtggtggctcacgcctgtaatcccagcactttgggaggccgaggcgggaggatcacctgaggtcagaagatcgagaccatcatggccaacatggtgaaaccccatctctactaaaaataaaaaattagccaggcacggtggcaggcgcctgtagtcccagctacgtgggaggctgaggaggagaatcgcttgaacccaggaggcagaggttgcagtgagccaagattgcgccactgcactccagcctggcaacagagttagaccccatctcaaaagaaaaaaaaaaaaaaaaaggaaaagaaaaaaaaatcgaaagtgatctgcaccagagcaaaccactgtcactacctgggatgtttagtggcttcaggagtatattcccaaatgacaatgtatctcccaacacttccacatcaaataacttccccactcacacacagacagacacaaatacacaacacacacaaataacctaaggagggaaaatattttagcagcaggaaaaacctgtttctgtgctctaggacttctgaattaattttctaaggtttgaaagtaatatactttatattgtttagtagccacactaccagcaagaagtagaagtagccaatacctcaataaaaagttgaagtaccgcctaaaaagcagctcacactttggcaaagagtgcaaaattacaagtatgtttccttttaatgcaaagactgaactctaataactctgtagtcaagcaataggcagacgagttaagtatcaggatttcttacttatcctaacaccttctcataaaaagagaaaccaattatttcactaaatgattaaaaagaggcagacatctaagactgtttggagttcattttgttagaaagcttagacatatctttcacaattgagaagaactagaattttttttcaaaagaggattactaatccaccttatatagaatactttttccataaaattttccactcaaaaatgtttcatatatatgtgcataacatgatatagattaaatagattaggtaaatataatataaacatatggatggatatgataggtatagatctacagaaaaatattaatagatatagatatacataactgattaacgaatgaatggactgattgattgattggcagacaggcaggcagacaaaaaagtagaggatttacatggactggacccaaattaaaattgagttcagcttccctcaatccaacctccaaaatttctcttgttctccccttctgcttctctgtatgatggtcttgagtacctcccttttctccaccccaccagacccaaattttccaggaagaaagatcagataaaatcattaatctaatgtgcatgtaaattgctggtactatgctgggaggaccctaaacagaaatacacctactttggcctggccaaggcagaggttccaaatcctgatatttcaatactgtgtttcagagcaggtacaagccttttagggcaacaggggagagtagccagcggctcacggcagtatagtcctaaggatgttgtccttatttgtagagtacactgaatcatacaactgtcaacttggtaagccaggaactctcatttaatggaatacccttcccgctatggtcctggggtacggctagccatatggggagcttaatgagacttggaaagtgaacctgaaaacaggccaccactctcataaggttgatggaaacaccatgatggacaacggcaggtgcccaatggggtccagcttgtctttgctttcttctgctctgatccctgtttcttcctaacaagcggccctgttgagcagcaagggctccacccagcaccagacacatggctgcagaccacagggtttggaactccacagacacagaggcagcagcagcttttggaatgtttcatccgttccctgctatggtccctcatcagcatcctgcagttctgacctgcccaaccctacgcaagaacttctggtgaaactttctctaatcctctcactttccttcaagacctttacttccgccagctcctctactatttgaggaaggaccaatttctataataaatcccttaatcccataatactcaccatgtttgtgtttctttgactgacagctggttgataaataggataatacagagaaaagacctcaatgcatagcctctgcgtatactagtgatccatttatgaaacaacttgcaattccatgcaggtgaacacagggatgcaaaaactgttcaccaaagaacacatttctttactgccacacataggacccaaatacacacacttagaaccacactgaacctctaaaaatcttctccaaaaatactaccatcatcacaaatcacttgctaccacagagcgctcaatgagtgctaaggtttcagtatttcacaagacaaataaacaactctcaggtaaaaatgagtaagtgacttctttcttatgcgttatgttcttaccccccaaaaataaaacaaatctttcctagattccctttagtcaaggaccaatagatccatttatcaacacatcttaagccagtggtcacaaattgggttcttgcaagctgattctggcccacagacgtgtttgatttggacctccgactttttcgaatgtttgaactgatcccaatttttggaaattgggagattttccctaaaattccacatttccaacttctgaaagactcgaaggtctagtcccctggccccactttcttgcatgacaaccatctcagttaccactctgcattccactcataacatctacctgggccctgaaaataactaagatggcaaccaccaacttgtacactctcaggaagccagtccccaggggccttagaggatcaaggaggttctcttcatgtgacgtctgcatttcctcagctggtgacttgctggtaagggccatttacatttggggttgcttttaatgcccccattttccaggtcataatgtagcacagttctccagttaaaggagagatgattaagaagaggcacataccttaagcaattagggctgtatcaacatgtccaggaacaagctggaacaccacctggctcagctgcttcgtgtaaaaatcacatcaccaaagcatttggagcacaagtattattcttcaccaagaagagcaatttgaggaagacttatctgccttttattagtaaaaagacactgcctggtatcactttccctttctttacatcatgagatggtgaaaccaaaaacagaaatggttgcacaatgggtgttctcaagtgaaagggatttgcaggcaaaatgcctgagactgaaatgaggaagcatcacagagacaaaaaattccacaaaaagtgtttctgcaaactttgactgaggcacttggggtaagttaattcccttctccctgtactggttttctcatctaaaatccatccttattagggcaccatagtgaagtgaactaaacactgcacacaaaacacgtggctcagtggctggcacacccattcaataaaggctgaaattactgttatcattttattattatcaacaaagacagctcatgcaaaattaaaaacacattcaaccaaaatagggaaggtgattcccttggcagccacttcagtcacagagagacatttgtaaatcaagagtctccaagttgagaggttgtatgtgttatgatttagagattgtgtttggtttggttcaagtacaaccagcaaacacattcaatagaaaatgtgctcataaaattgtctctctctgtagaatcacgggatggctcgttacattcctaaaaccatttcataacccattgattcaacaccacaagctttttacaaaaatgtccaaacataaaaaggtaaattctcccatgatggcctccacacatctggaggtaagtggtaaaactggtgaggtcctgtggtaatttgaaaagtactttgttcaacttgcacctcattattctgcagcaagtcatctgaaagggggcatgctaagcaaaatatgaatatgtttagttggtaagccaaataacattcctagattttaaaagcaacaggctgacttctagtaaaatgttcagtaaacagttatgcatctttgcaaaagatttgtagatcaaagagtatttggattctgtgtcccttaagaaaaattaatagcaaagacactatctccgttttacagattaagaagtggagcaactggataaaatgacaagatgctttgactgaatctcttaaaaattcaaaactccaaagtattactatcttgataaggaaagaaattccacaggaaacttagagagagaaaatggcttgcaatggtacagcttcattaaaaaaaaacaagagacaccaactgtcaggtgacattcactcatttctaaaaattaactgaagaaacgtggacacgtgttccatgacttccagctttctggtcattatggtttctgcctctcagcagtccttccccgttgacacaaactccatgaaacaatcatcggaacgtctgctaaactacatggacagctcactgagttgctcaagaaatgtttaggtagaggccaagtaagtttcaatctccggttagcctagaggtccaaagatgaaaatgttgtatcctagtgaaggtgatgggcttgcagacacagacttcccaatgctgtgcacttcacgctatatacaaagaccactcaaggactcaggaagcagaggagaaactaaccaggccagccttacgtggacactattccaagactccacaaagtgagaggatttggtctaaatacatgactgaaaagagtatcaccagcttgtgaaaagacccccgtctttttcacaagccattcaaagtggaaggaatcatatgttaacagcccagagatgcgaaatattcacaaggaacagtagtggcagtaaagatgacctgggaagaataattagggtcagtttagaaagaactatgtctcaaagcctggggttttgccagcaggaaaagggacggtccagaaagcttttaaacaggaaactggcctaactggatcactgttttagacagagttgttctatatgtggactgaacaaagcaaggaaactgcatgctagactagttgccaaaaacaagactatataatttattctgtttaatgtgtctttgctactcatccttcccttcatttccctcaaacacctcataactatgactaggtcactataaattcctaaactcaaaataatatggatgctcagctttctggaacattaagggtgcaaatctggaaagaagaaggagaaaatgtctcatttctacctgaaagaaaacattaaatacaaactttttgacagatgatggtttctggagaatttttttttttaacttgagttacttttaaaacttgtcatcactgacaagcacaaattaggtggaaattcattttttaaaaaaatagacaaagtggtagaaattaagcaactggcagttatagtaaaaaaaaaattcaagttctcttttaaaacaaagaagtgcatatctgcttagtaactatagtgctaatcaaggcaatcacacatcattcaaagttatcacaaacccgtattttccattgccattcatctaggagtttctgtatgaaaggtacagactttaacaaggcttgcagtgttcattgaaagcagctacttatttttccacctcccacaaaagaagatgaggcattttcctaagctttgctgaagtgccaactgcgagtcacacaatcacagtctggacagaggtgaaccatgacaactgatgggaccacctacttcacaacattcactaacatacctgccacatgcatgcagatgctgtgctcttgttagtcttgaaaatgaattgcttcagttctctgtgagaatactgaggggtctgtttaagcatgacaaactaaaaatcctcttacaaacactgctgcgatattagctaccatccttgcttcggtttacaactagactctcctgtgagatcacagacaaattcagcagactgttttgctgtaggttttactttaagtattaacttctcagatcttacattattattatttcatggagacaaacatcatacacttagtaagaccagagctacactttatttatttacttatttatttatttatttatttattgagacggagtctcgctctgtggcccaggctggaatgcagtggtacaatctcagctcactgcaaattcaacttccctggttcaagcgattctcctgcctcagccgcccgagtaggtggtattatagacatgtgccaccatgcccagctaatttttgtattttagtagagatggggtttcactgttggccaggctggtctcaaactcctgaccttaggtgatccatccgcctcggcctctgaaagtactgggattacaggcgtgagccaccgcgtcaagtcgctacacactttttttctttttcttttttttaatactttaagttctaggatacatgtgcagaatgtgcaggtttgttacataggtatacacatgccatggtggtttgctgtgctcatcaacccatcatctacattaggtatttctcctaatgccatccctcccctagctcccaccccttgacaggccccggtgtatgatgtgcccctccctgtgtccatgtgttctcactattcagctcccacttatgagtgagaacatgcagtgtttggttttctgttcctgtgttagtttgatgagaatgatgctttccagctttatccatgtccctgcaaagtacatgaactcacccttttttatagctacatagtattccatggtatatatgtgccacattttctttatccagtctatcattgatgggcatctgggttggttccaagtctttgctattgtgaatagtgctgcaataaacataagtgtgcatgtgtctttatagcggaataatttataatcctttgggattatacccagtaatgggattgctgagtcaaatggtatttttgattctagatccttgaagaatcgccacactgtcttccacaatggttgaactaatttacactcccaccaacagtgtaaaagtgttcgtatttctctacatcttcttcagcatctgttgtttcctgaatttttttttttttttttttttctgagatggagtctgtcacccaggctggagttgcagtgggacaatctcggctcactgcaacctctgcctcccagattcaagcgattctcctgcctcagcctcctgagtagccaggattacaggtgcccgccaccacacccagctaatttttgtatttttagtagagatggggtttcactatgttggccaggctagtcttgtactcctgacctcaggtgatccacccgcctcagcctcccaaagtgctgggattacaggcatgagtcaccgcccctggcctttcctgactttttagtgatcaccattctaactggtatgagatggtatctcattgtggttctgctgtgcatttctctaatgacccatgatgataagctttttttcatatgtttgttggtcgcataaatgtcttctttcacacttttaaatatgcttctagatggagtctttgaaaaggctctcaatttcccaggaaccaacaaacagataacatttcagagactctgaagtggatacaaggaaagatcaggtgaggaactaaactgtggcaaaacaaaacaaaacaacaacaaaaaccagaccagaaaaaccaggaacaccatgatttcacaaagttgcatcaaaaaagttgtcaattttcttctttttcgtctggttgcaaatcagaaatatttaaaagttttaattcagaggcttccttcaccaaatgaatctaagaatctggtatgtgttgtaaaactgcatattgtgttgggcattcaggaaaaaaattctctgtacatttgaacttacactttgggaaattgctaaaggtagttttagtcattcacattccaaaccaagcacgaccaaaaacaagcttttaaaagttcaagcatatttgtgtattgggaaaagttaggaatgtaatatttagtgggtgggcatttttaaataatgtacttgtcccaaatcttccactgcacagcagagctgcagaaatgggctggagtcctcactctgccgctaagtatctgcctgaccttggacatgggactgaggtctctcagtttcagttgcacatttgaagagaaagaggaggtgagaagaaactggacacaaaaagtctaaaggccattccagttccaataaggttactgtccagtactatcttaaaagttctcattcagctatcacatctgtttgaaaattaactgtagagatatgagttaatcaactatagttggcccttgaacaacataggtttgaactgctcattcccacctacatgaggatttacttccacatctgtcacccgcaagacagcaagactaacccctcatcttcctcctcctcagccctactcaacatgaagacaatgaggaagaagcccttcatgatgatccacttgcacttaatgaatagtaaatatattttctcttccttattattttcttaataacattttcttttctctagctttatttatttatttatttatttatttatttatttatttatttattagacagagtctcactctgttgcccagagctggagtgcagtggcatgatctcggctcaagtagcctccgcctcccggttcaagcgattctcctgcctcagcctcctgagtaactggaattacaggtgcgcaccacccacacccaaaatagtttttgtattcttagtagagatggggtttcaccatgttgaccaggctggtcttgaacaactggcctcaagtgatctgcccgcctcagcctcgtaaattgctgggattacacatgtgaaccacagcgccaggcccagcttgctttattgtaagaatacagcatataatatatagaacaaacaaatatgtgttagttgaccatttatgtcatcagcaatgcttccagtgaacaacaggctattcattgttacgttttcagggagtcaaaaattatacatggtttttcagcttcacagagggtcagcaccccctaatctacattgttcaaggaccaactgtacttgtagataaagctaagctttctggaaataaaagttttttaaaaaattaaaagctaatattatagatgttttgctacccaatatgtgcttaacaaacgtctgctcataaatgatgaagtcaaatggggaatagacagctgccgtctgtaagtctctggtagattgtttgtaacatagccacaattctctccctaaatgcacactgttgaacaatcccctctctcactgactctaggtttagccaggtaacttgctttaaccaaaagaatgtagtagaaatgacactgggagactctcaagtctaaacttcaagaagtctggcatttttgaatattgtcatcttggggcactggtgccatacaaacacacctgagctaactggctggagacgtcttcctcctggagtacctataccacctccaacactgtgtctggctcatagcaagtgttcattatactgcggttcttacttatgcaggcatagcttggactagctgaaggaagaatgtggtgtgaagtaacaaagaagaatgaggggaaggaatacatgggctggatggaagcaggtgctatagcattcactggatgactgactgcttgagagagccactattctgttccttgtctaatgaactttccaggatggacatagtacataacagagcctagctttaaactagactatacacaccatagctgaggaaatcacaccaacgtgaagcggtttcatcctacatcaaagcagtggtcaagtcaatactaattggaagttgcaagaattatcctctctcaattattaaattaacgatccagcaatcttaactcagcaaggataagaccagttacatgctacttggtttttagaaactgcacattaaatcagaaacctaatcttaacataggctacttctgctaactctcttttagcttggtgacatttgtgttgattcatgattcataagccccatgctgtaagctttgcagggctggatcaacagagtgatggctattaaagggaaataaatcatttattttcccactgtggaaggtaagcttaagtcaccatctacaagacatagccatggtggcacattttcagagcatttgcaatattagtaacaaaactgcaactacaactttctgattacctgagaagggcccccactatatatctagagctttagaaaaacactttcatttaatcttcataacacctttcaatggaaatgttattattctcatttttactgctaagcaggttggttcggcaaagctgtgtggccacagagcttacagtgccagagctgagcctggaatgcaagtctggcaaactccgaagttcaagttcttaaccattcttcaaacaatgtggtcagcctcttcttggcaccttgaaagaaaactcaaaaatgtagacatgcttttaaaatcctgtcttacagggagatcacaccagtttttgtttgttttaggttccaaggtacttgtgcgggatgcacaggtttgttacataggtaaacatgtgccatggtggtttgctgcacctatcaacccatcacctaggtattaagcccagcatgcattagctcttttccctaatgttctccccaccccgctctcccccgacaggccccagtgtgtgtgtgttgttcccctccctgtgtccatgtgttctcattgttcagctcccacttgtaagtgagaacatgcacagcagttttttttaatccccatgttaaatagtgtggctaatgcaatacattcaagataaatagaaaccagaagtgaaaaacttgcctaacacctaaacctggatatatatttcctatttttaggcggcagaatatattacaaaaaacacattccaagtacacctgcctgatagacaataaacactcaaaataaattttaaaataatctttaatggtaaatattttttatattcaatagacaagagactttcctcaaattttttagaagagttgttttcattattactattaccattgctgttgtgttactgctgttatttattcagtccaagcctaagctgcaagaagctttagagcttccactattgcccttttgggactctagtatcacgtgaacaagctaatctgctggagaggcctttcccctggagtacctacacccccttctagcatagtatctggttcatagcaagggttcattaaatggcagttcttatttacacaaacatagcttggactagctggaggaagcaagtcatacgaaataacaagaaagactgagaagggacatactagtgtataaagtaaaccacttagctctttgcacttgcccatgacttgtcttgatcagtatcctgtagcagaggttaacttcccatgtgtaatactttacataaagagaggcaacaatctgtcacttttagcttaaaatttctacaaacagaatcaaagagtggtctcactctagcagtgtgaatcactaatagcaccctcccacagtgctcttcagcccagtaccccgtctattcctcttgcttattctgattccatttcctcctccctgggctggtgatctcaactcctgctaagcaccccctcccacttacaaatcatgaaactacaaacattctcttatgaagcagataagagagcaaaaattacactttggcaaagtgtaagtggtaggtagcatgtttggaaggactacagatctagagttagcggagatagaaaaagaggtgttacagaaatcaaatgaacaccaggaaatggtatttgaatggcaaacttcatctttggaaataacttcacaccacaggttaaaggatacttgtagcaacgtcgtaggcattggcttgggtttttgtttttatttcttttttttttaatctactactggacatcatggacagtacaaccaaatgattcatgcaaggaccagggtgaaaatctacctgtagtaacaatgtaataatacagtgatcttttcataaagattagctatgatccaggccactgatccaggccataagaatttcagtatccacatatgtaaaaggttttctacaacaatcctatgaactagttaatatcctcacatacacattttacttctgagaatgaggctttaagcagaaaaggtgattatttttatattgagagccatgtcgtcaacagcagatagatctgattatgtccaagtttaaagtaaacataaaaatatttataaacttcagcaaatttgatttatacagtaatgtaacaccgatggtgcgtttttactacaaaaatgtatttttgaaaattgttatttcacttaacttttttctgatagtcccaagattcttaaaggacatcataaatttctgtgtgtgtgtgtgtgtgtgtgtgtgtgtgtgtgtgtgtgtgtgtgtgtgcatatcataagtgaatgcatgcatacacatatctacttagagtaaacatacagttatttaaaaaaaatcctcccaaagtatgaaagttccttatctctgctatgatttgtttcgatcccctcaaaataactagtgtttggcatacaaatattttaaagttaatgtaaattaaaattacttctcttttaaaactatcagaaggtgagataaattggatctcacccaagtgtttgaaaaatcaaaactgaaaataactgatttagggaaaatcggaactgatctataaagaaagccataatttttaaactccagtattaatacaaatgcaaataatcttttaaactttaggagttaagaccaaacaaattcttttatgacttaattaagtgtgaattaatgggaattgtattttatcatgtacaaataatatattagaatcacaagaatagcagacaggagcgggaaccttctggaaatctcccctgacataaattaagttgaaattacttactgcaaatggaagctatgtgtaactgttccctccatcctggctagaaaagggatctcaagaggtatgagcactaaaaagggaaaaaagactacataaaatagccaatctaaatataaaaccatatgaaatattaaggatgcgatttgaatgttcctgaggccgttttaaagcctccatttgtgatctgaccctttcagaataaatattaatttgttttgaagtagcttttatgaacaaaacagcctctcatttctatcatgtaagtgggtgtagtaaacatagttaagctgtgaaagtgagaatttaaataaataaaaatagggtcaataaaaagctacttcagtccacaaatgattccgtcattcaatttctgtaaattggtaggtagagcattttgcagtgtctgtcagcatttccatccttaggactgaataaataattgaagaataaataattgtgccagtgcctggtctcaggggccatttttatagattgccatctaatgatagtacctcctgcgtgacactgtattaatatgggataaaattacatagttctttgtttgcgctgacacagtgatgttacaatgtcctttactattgtctggaatacaaggcagaggtaatggtgcagtgagttttttactgttaaaatctccatgacggaaagagacagctctgtttgtgtattccaaagaaagtaagttggcaatgacgattaccatcgcaaaagtagtaggggggcaggggtgggggaggagtaaggctaagaaaaggattgttttgattacaaatgatgagtaaggctaaaaatagctcaattggaagatgatacctctttagcttgctacaggaattcttcagacccctctcctctcccatccttctatccacccattctacaaatatctcacaagaaacgaatgctgcacttggtactggagttttaagacttatcaagacagaaacgttccttttctgtccaatttcaacaggtctctttaggtagagaatatgataatgatattgttatttttaataaacaacagctcccactctttgagctcctattgcataagaagcacttaaatcttaaaacagcatcctgtcccattttacaaaggagaagctccaaaagatgatgcaccttgcccaaggtcctaattacacaggtgagtaggttaaaagaagccaggatgaaaatctaggttcacttcccagaatgcaacactgcctctcctagtctaccctcaccacagacccaccaaatcaaaaagaggaaggaatttatcattactcactttgggcaggtattagactccccgccttggttccctcattttgcaaaatggagaaaagcatacctatctcagaggtacacggtgagcatgaaattagttgatacctgtaaagctcttagaccagttccctgacctacagtagatacttagaaaatgtttactattaccatggcttcaaaaaagcaggaaaggaccaatgatactgagcatgctttaagtacatatggatgtatgaaaccattctgatttaggaaactgatttaggacattagaaatgttgtgagagccattttctccattccatagcacataatctgctctacataatttagcatttaattatatactgccttacattgttgcctaattgtctgacccagcaagactctagcttaccctaaggggggagaccctttttgcttctctcgtttctccctaagcccctgtgaccagaccgtcagtacttttgacttaacatcaattaatatttgcagtggaagttttacttacagaaaacataataggatgagatcgaaagcaatgtggaaattggttgattctggagatagatctggctgcacattttttctgttcatccaacttaatcataccaacatcttagcttggccgtgtcttttttctgttcttccatcatactaacatctgttcacaagtgtgttgggattttagctaggcatttaacaaaatgtttcaagtcagtttcaaggcatgataaagaaatcgagagaaaaacattattagtgggaactcttacccaaagggacttactaatgggttacgggaacccaaggcaggtaggtctacagagatgaattgaagggttctgacttgccaatatagccatccaagacacgaggagcacgattaccaaatttgaaagaagcctgaagtggagcaagaatgacctgatactggacttcaggggcagatgccaatattatctcatcaggctggaatttgaagccaaatctattaagaatttcagtatcgaaatatgtaaaagttgtagtgaagtccaccagaggacagaggaaaatatattcacttagtagcccatctaggagtctgtacaaatttttagttgattagaactatgttatacattagtgacatatgctatacattagtgacatacgctaactaattttaggttactcaaagagaaatgaaatgacacctccatcggtgaagcatgctgtggacggcattcatcagaaatagatgagctctggcagggtgcagtggctcacccctgtaatcccagcactttgggaggccaaggtgggcggatcacttgaggccaggagttcaagaccagcctggccaacatggcaaaaccccacctctacaaaaaatacaaaaattagctgggcatgatggcacgtgcctgtaatcccaggtactcaggagtctgaggcacaagaactgcctgagcctgggacgcagaggttgcggtagctgagatcatgccactgcactccagcctgggctacagagagaggaaaggaagagaagagaagagaaagaagagaagagaagagaagagaagagaagagaagagaagagaagagaagagaagagaagagaagagaagagaagcctcttaagaaggatccagcacaaataattccttatgcagagagggaagcattcatgcccattcatttcagaagaatgactgtgtatcatattaataacatatagctatgacttactgagcaattactaaagccaaatactgtgttaagcattttatatggatttccttctctcatctttccaacggtcccttgggacaggcacactccagcaggtatgacttcattagagaagggaggagggttcgcctggaaccttccttctcagttaacacaaacttttcaggccctctcccagcctcacctttcagacgcttccactcccgcagcacaagagcggacaaagaattaaggaaaaggcaaaaccggaatgggggtggggtgggagtgggggtgagggtgaggtatgacagaaatggagaaattagataaataactgcggggacggggagggggagggaagaaggatgggagatgatctaagcaaccaataggaaaatatgcatttttctgagatcaccaccacaaaagttcagaggttgctccagacacggtaaatcttttcgtgtcttcagaagtcattttctgtcccagacattcgccccttttcctgttgcaaagagaaaggggccagcgacccgtgaagagccaggaatgcatccgagggagctccagctaagttgcagggaagctattgtgctcccgtgaagttcaaaggaaaggaccgtctgtccgggctgctgagctgtggtgcaggcagagggcgcggaggcccgggccaggcagagccccacgcgtgtccggccccgcgcaccgcggccaccaccttagttgcctcgtagggggctacgagagagagagaagagagaaaaaaaaaaaaagtccccaccagacgggtgagaacattgaattgagcgagcccggggctttgggatccggccaaggggtgaggggcgagatatttacatttctccaggcaagagaaagggagagctgggggctggagggaaggctgggaaagagtaaaagaaaacaaactgctttttccattaaatattcatgacagcagctttgctaaggctaatggaaagcatataaatccctttacaactctgttaaatgcaaaacgagaaaaaaaagatggatgagggtcacagcttgctctgggcaaattggaaggaatatgaaaatctggaccacagaaggctggaagctcagggagaggagagccggctgtgggttttattcagacccgtgccagtaggtgtagataccagtctcattcatttcccatcactacaataaaacactagtcaacaagcgggttttcagtaaccccacactccgaacaggcatttttcctcctacaattttttgtctcagatataatgccatggttacatctgacagatgttactgctttaaatcctgcttcaacactgctctgatttccaggagcacctgcaaaggaatctttgggcaagtgcccaaattcctgggcccagagagaccaggctgtgcacagtgttggagtctgacaagggacagtatctgggaagatcaagtctagactcaccccaggccactctagttttaggcaccttgaccgtgttgtgtctccattcccgatactgcagctggacaaaaggaagagaggctgatctatgtgttcctcctaaggatacatagcaggaggagtgtcctctaaggcacagaaatgtttgtaatgaggggacgctgcaccctacacagtgtttctaacgacacaagtttctcattatttaaacaatgaaagaagttcctttggaagaaagagttattatttgtactgcagtgggtcattgttctgggttttggtttttttgttttatagtttatatatggtatgttaggccattcttgcgttgctatgaagaaatactggagactgggtaatttataaagaaaagaggtttaattggccatggttctgcaggctgtacaggaagcatggcagtggcatctgctcgggttctcctgaggcctcaggaagcttaagtcaaggcagaagggggaacaggcatctcacatggcaagagaaggagcaagagagagtaggggagaggtttcacacagtttgaaacaatgggatctcatgggaaatcattgtgtcctgaggacagcaccaagccatgacggatcagtccacatgacccaaacacctcccaccggaccccacctccaacattggggattacatctcaacatgagatttaagggggacaaatatccaaactatatcatatgataaagagaaaacaaatacatacatggttatgctttggatagggagtagatttatatatccccactgagataattcaggggagagggaagtatattcctaaaacaaaacataaagcaatattccaaaagaacctcccagaaaatttgtaagttgctttataagagttatatgatctcaaaggccacaaaacacaaagtcagctgcttttacatgtacatgtaaggtatcaacaccgataaggttttgagaaagaatttcactttccccattagatccccattccagtaggaaaaggggattgtgtcaacactggtgtttagaacatccactgtaatcattttgtactttcattctagagaatgtagatataattggctggtttggatgaattttaacaacagctgtaaacgttagtaagttttcaatgggtccctccatcactgttactcccaaagtctttgtgtatatttccactatcacgcagtaattattcctttcaggaatatgtctgtctcagcccctctccccgtagaacacctcctcaaaggccttgaaggccaatggctgtgttattcaccctcatgcccagaagcaatgcaagtatcttatgaattcctcaggaaacccaatccctgccacaagtgctcacactgtcagtgctcacaatagtaagtgagctcctattacaaagaagggtctgccgagtgaatatttgatgaaatttttaggaggtcgagatgcctttgtttcttaagtaaatcaattacttattttttatcttgtatttcagttatagaattgactgcaactggatgaaaattatacagtaatttttctttgatttcatatagatagaaaatcaagaattattaatgagcaaataaaaatagagtaataataaaatatttcttttttgttgtttttttgaaatgcttggaaagcaatgttacaatttaaaactagagggaaaggaagggggttgaaaatcaatctccagacagaattttcaattaaagaaacaacacacagaaaagtccaaaaacaagttcatttttcttccaaaaagtacatttcagagttttttttctttttaaaataacataaacaaatgattctaccaagtccagaatttctaggaggcaagacacagtcctttcaaggtagtatgctaggaatgccaagagctctgctgcatatgaaaaaggtcaccaatgagcaaggagcttccagctccaggtattctcaagccttccaggaccaccaccaggctttccacagtcccctaggccttcttccttactgaggcatatgcagccaggattcaactgagaccaacctgatcaaattcccaccaaaggaggactcaatgtatatgggaaccaaatagaataaaaactgtatttccacagttattgcaccatagatagctctccatacacttctatagcaaaaatactaagtccttactgctacaagagcctatcctgaaggatccttaaaagcagcattaccttattgcatttatcatcaaagcagtaaacacaaggcttggtacactggaagtgctcaataacatttgtggaatgaaagaacatggcaaaagaaataaggaaaccaaacagaattcggcagaagatttaggtcttaattattctgaaaagcaataaaaacagaattaacctagggactctaataataaatatcaaacaaagtgacaataaattaacttcacaattaaaaaaatgtttttaaagagttaccttttctacctagtattcctggctaggtccacactttaacaaatattctttatattttcattaacaacactttcacattcactacaattaaaatcagtacttacagcctatattataatttcgattgtgttcttttttaaaaaaagaacatttatgaataccaaaatgcttctgttataatttgagtgctcattctgtgtactactggcaacagactattcttagtagtaatcatattttgtatttctttatagttttattattcaggtgtacctccctagacactatgatttagtcttggccattttttaaaacaaattttttttctattctttaagtcactttgaatctacatattccttttccaactccttttttacacaactcactatgtatctgttgaagaagaacaaggggcatttgaccagatttttcctgtttatttttattttattttatttttgagatgaagtctcgctctgtcacccaggttggcgtgcagtggcacaatctccactcactgcaacctccacctcctaggttcaagcaattctcatgtctctgcttcccgagtagctgggatcacaggcacaggccaccatgcccagctaatttttgtatttttagtagaaacggggtttcaccatgttacccaggctggtctcgaactctgacctcaattgatacacccacctcagcctcccagagtgttgagattacaggcatgagccaccatgcccagccaacttttcctttttaaattttactaacaaggcttcctaggtcatgaccattttttggtgggaaaaaaaaaaaaaagcttagtcccaaaggtcattctgaaagacatttacatcataaatacatacgtcatctttccacaaatgaagggtaattaaacaagggtaaacatgtagcctttggttatgttacatcacataccaccatgttgggaaattttaaattgctcctattcataaatagggaaatatgagtcatagatgtgtttagttaaaaaagattaaggaaaaccaagagtgagacgtgcacatatgcaaagaaaaaaaaagtctcaagtgaaagacaaattgttacaaagatcagacttttgagaacacaaagaacagtcacactgaattccattcaaatattaagaacctaccatgtgcaaaaaaagtgctgcaaaaacacgagttaagattttaagttccattaaaagagaagttatgataaaagcacacacacttaatgattcctgtttttgctgtaaaagttcttatatgctataaaaatgttactaaaaatacgtccctcatagacaagatttttcatgagtaaaatgaacacaattagatatactgacgaatcaggaaaatagtcatcaaaaacattttttaatcaaagtcaattctgcataggaaaaaataattttaagggtacaaaaagcaacatactgaaatattaaggaaatttgatctccttatctttaaaaataatcaactatagttcaaacaagccgagcaaatgggaagatactaatttttcaccatgtccacaagttggaggctaatttccctctgtgcatgaagagtattaattactcgaataaaacctttttggtaaagcttagagttccttttgatgtcaaaaacacagaaagttcaaaggttagacagccactcaacagtatgacaggcctaaaacctgaacaggaaactcatttctaaacttacccgtaaggtattgcaatcctaaggccagagtggccaggcattgttcagccggctggtgtttttgtactttgcctaaggatttattcagaggggtgacaatacctgcctcatcaccaaggagaaacattcttttggatacaaagaatcccagccatttcttctaacaccgcccccacccccaccccacccactaattagtttctcaacattctggaaggccaaagaccctagtcaagttgaatagccccggatttagcccacattatgttctatcttgcacttcacacccctcccaaaattaaaaagaaaagaaaaaacatgaaccacattggatgtagtcaggaggaggatggctgcaacaagatttacttggaaataagaaataacttcaatagaaagaaagaagtggctaatcatatagaaaaggtgtcatttacaaaaggttaccagaggcatataaactcagggaagccagattttggcatacagtgtgagtcattcccttattcaataaacattccctaatgcctccaggcaccctgctaggcactggttgaaaaggcaaaagtggtctctgttcccaaagagttcacaatgcaacagggatttgaactggaaatatgaatatgagtatctgtttggtagagacctcagacaatcatcaaagcaatagagaaaatggtatggaggacgcctccacaaattcagatcatctgtgttttctgagttgttcagctgataaatgtgacttgccttttatcatcaacaagaacttcgtaccaccctgaaatctgatcaaatactgtttccctgaaataggagatatcatccattttttaaccactcaaacttcttctcttatctattaatttcaccattctttagattcaatatatcaagtctggaaactaatagatgaattaagtaaataactgcctttttttttttacctcccataaattggatccagttatcagcaaaacactgaagttccctgaagaagttctggtggagactgaaacattagtttttaaaggagattagttttaatcaaatacttaaccttttatatcacttgtagtttaaatggtattctgcaggcgttgggcataatcaaaatgaaatgcatttttctctgaaggtagttcttttaaaactcggccaataataatgccttttaaagtgcaaggatttttgccaccgaaagaacctgagcaatgaacttaaaactacatttttaagtatatagataaaaagcatacctcatctattataataggtggagcaagtgttggccctcctttactaaatacagaagtctcatactatgagaggcacttcaatgcagtgggaagtcataaaatgtggttcccattctggtttcttcactaattaacacatcatctctccatgtctcagcttcctcataaccctactcttcagcaggcagataagaccattaactcttttggagggctaggggggagggtggagtcctaaaattcaatggataataaaactagttaatatttagggagcacttatcttatgccaggcactgagcaaaatgcttttcattcagtatctcatttaattttacagagcagcactaaaaagacagataccagaatcaccattttaccgatgaggaaatgggggcttagacaattaaatgacacgcaaaaggatatcaaatactcataaccactaacctcaaccatttccccaagccttgaagttctcactaggtcatgcaggtaaccagattccaactgatttttaaaatacactgttttccagaaaaagaaacattttgcagtatttttacataagattgctgaatgtcaattctgcatacttttgcaataagaaggtttcaatcaaacaatttctctctttgttttagctccaagtagatatactatgcatagataactgcttctaaagtcagagcagtgttctggaatgcagaaccagatcatctgctaggatgtacattttcatccccaatgtctacagaacaggtatttgggggtcttacctttcataaagtgttttcatcacagaagctgcccccaaagaagatgaggaagcagatatctaaataactgtacctcttcctcagtagtctttctgatctttgcccatctgcctttcatccctgcatatactgagtcccaggaggagatggggaaaaggggattacaaagaaattgccactgtcatttaatgaattgatgctggcgtgcttttaatagccccatttaattgtgcagtcgtattttctgcagaagccctcctaccactaatgtattaacagtctcttaccctgccccggggaattacaactgctccattttctcctctttcaacccagtctgtacattatttgccttcctcttaaaattgtcacaaaaaccgagagcaaaacaaaaaattgcaaggttttagccagatataaggtaaatatatgaaaatatggcatttaactgctgggggaaacaagagtcggggagttcttgtaaaagaggagtgtgattaacagtataaaaacgatcaagtcctgcggccacaatcatggggacaagaaatgttaatttcccgttattttaaaaccataacatcattgactccattacagagaactgatggcaacatgtgacctcagactaggggaaggggatggattttctcatcctaagatactatgccaggccaaaaataacaaaatgcattaaaaatagctgaagtcttaactgaggcctgttgtatccagggatatatttatttctaaactttcgcatcatgcaccataacacaatgcaaaaagaacaattctcatgtaagtttcactattgtcctaaaaagcattgttcttcacatctgagaggaaaaaaagtttctaaaactagacatcatgaaaaggcatcttaagattacggctggaaatcttttgattttattatttggaaaattctaaatttattttccaataagatctttctgttctttccccatcatactaatacgaataaacctcccccaaaataaaaccattataaggtgacaataagattgagtaatccaaaacaaggatattttagcagatgtccagtttcttttaacaagaaacagatgggcaaaatttaagtaaatgtggggtatcaatttctatacaacaaatgagttccaaacttacaggtaatgcaacccaaaacaccaggccaagctaactataattatatagtgagctgaacacgttttcttttaattccatttcaaatggttttctcacacgtctttcctacccacatgcccggtgaaatctctgctggtcttctggacttcattttaatttccctcactcattctaaatttcttctgaaattgaaaatagagaagaaagaattaagtttggagcgagggaaagaaaccagaaatttcagaacagtaaggccagcactactgattacactctcttccaatcagtttctcaatctctgtcaccaggatacgccctggagtatgtacttatagcccaagacatttttacacctcttatagttgattgacaagaccaattgacagttaaactggtggggcttgcgagatggagaaacagacatatctcctcattttaagcatacaatttgataaaattccatctcaggatataatgatacttttagctaaactctggtcttgaggaatttaagaaccaaatttgaagtttagacttgtgaatgagcctaggacacaaaaagcacttaataaacgcatactcaatgcctgagtgaataatctacagaacagtaatctccacaattaaagaacatttatggaagacactgtactatttaatactctccatcgagtccccattgctcctattatatctgttatgaatatatcttcttcttatgtggctaatcacccaccagtcaccataagtgtttaatgattcaggttgtcaaggccagcctggccctaatccatattctgaatataaagaattcaagaactaaacccagtatcattaggcagacaggttctctgcctatgccctaggtgacacctcaacacctctcttcctaatctagtttaataggctcctaagacgccacaccctttctggtgttcttactgcccagcacagtccccaggacatagtaagaagctcaatagaagttttctaaactcaagaatcaagcactattgaccaagctattggtcaatgggtctcaataagaaaagagggaggcggggcgcagtagctcatgcctgtaatcccagcattttgggaggccaagacgagcagatcacttggggtcaggagttcgagaccagcctggccaacatggtgaaaccccatctctaccaaaaatataaaaaattagccaggtgtggtggtggacacctgtaatcccagctactccgaaggctgaggcaggagaattgcttgaacccgggaggcagaggctgtagtgagccaagatcatgccactgcacaccagcctgggtgataccatcaaccagtctggtaatgatttatctttgacctagtaatcccactggagtggatcctgaggaacttatctattagtttggaagacaaatgaggtaatatacaaaccactgatctaatcaccaagctctctcagtcaaactgaatgggagagattcaagatcctcaactaggacttttataataacctagaccaagactgtctggtgatcacagagtatacagagttaagatgcaaggaactctcccaagctagaataaataggacttgctaaagtgactatgtcccagatgctacctcctgggatcaactgcaagtcgtgtcataggaattatcacagagcacaaagtctgtactaccatagtacttgtcataatgcatcttgttcatgcttggttgtgtgcacatccatctctttcactgggctgcaggctcaaagactgcagggatcagattttcatgcagcaattcaacaaccaagcaagaaaccaagctgggcatgttatataattcagtcgttattaagcctgcctgacagagcatcagggtcacttgtaaaaccttcaaaacccaaatgcccagagcccagctcctcgaaatgctgggtccacatatgtcagtgttttgaaaagtgcttaagtgactctgggagcacagtccaggctgagacctagggcatggcattagggaagcgtttgattccagagcccagttcatgcggtgttcaaatcctactccgccccttatgctttgcacgactctgggcaagtcattgaactcaagtcttggtctcactttcctcatccgtattaataaaatggagactggcctaatgtactcaaagagcttttgcaaaaattagatgaaatagtgcatgttaagtatactgccttctttatccacagtaagtacttaatagatgacagatattcgggctgggggcctaaagcccagtgccttacacaatccatattgtattacaatagatgtttatggaaggaaatgggatgagcctttatggctaacaaggtacagatgtttcgattgttaagcatcatacaccatcaggtaccactcttcatccaaagatggtgtgacaaattgacaaagggttaggaaaaagtgtttagagagaggtgggtaaattcaacttggctatcaaatgtatatcatatagaaacaaggatgctgaggttattaaaataacctatttgctacagccttggtgtctgtcctctctcccatgggaacaatgggaggaagggtgagcagaagaaagagtaacaccctccaggttgtggtactattgtgtgttgccattttgttattaaagccatataccatagcttaggcgtgggggacaacaataagtggcatcgggccagcttcatcagaaggttagtatttcctatagatttatggtacctaaagggttgttttgtttgtttgttattggggctgtttttgttttttttttttttttggttgattggtcatcttaccaaagaatatgggaacatactatattcagagcctactgaaagacaatgccatttttacagtagaagtcactggggaaaaacaatttgcttaataaacattcactttactgcaaactttaagggaatgcatccattacacaactgggaacaagagccacatgttcacatacacatatctatcctatgttactcgtgtgtgtgacggaggcaaaaaaaaaaagcagtgtttttactgaaataaaaatgtacctgttttgttgcagagccttgaaaaagaaaagcttaatccactctgcattttcacaagcaacaaattttgtgtcactgtgtatcctctgataatctattttaaaggaacatttcaagcaccagaaaaataaaagaaaaatatcccttagatgaatctgacttgtaaataaggaaagctattaagtgcttactgtttttggtctctctatcataaacactataaataatctcagaatatacagctcatctggccctactcagcgaggcctcatttttttagtaaggaaaagcacacaatactggctaattttctggtacccaatcctcatcttttaaaaataaataaatgaataaaaaggtgggaagaggaacactgtcaatcagataaaatagaaagtctaggaatataagcaagtcttgtgtattgcctatcacgtacatggctagttatatttattgactgcctaaaatttgtgaaaggccacctccaaaatttcttgacatcaccagtatttttatggacttgggagcctctttaggtaaaccattttaggagcaagagtacagaaataatccatcctgaaaatgccttctagtctaagcacctggcataaagctattgtgaccagtgatttcatattatggccttccacacataaaggaaatgctctgaatcctaaggactaattgcacatccacagacttcctctttcaacagagcttttaattgggcactttaagttgccaagtacgttcaaaaatggtatttccagtaagcacgcaaagtgatcttgaattggaatattcagcttccctttggatgaggaactgatgcacttattttaagctgttcattctctagtagatgacaacatgaagggagaaaccgagaatcttggtctatttaattcagcttgcattcataataatatgaatgtttcagtataatttcaatgcaaaaagataatgtaaaaaggggttagaaatctaaaattagaaaccactactcaaacaggatataaatattagatatgtgtacttctacttcctgtaagcaattagttttgtagtagacagaatgggataactatttaggagcttaattttgtgttagactaggttgtttctgaaacttccctcctccagtaaaaccccgtgttttgattcaaaagaaaagggtagatatcacctacaagactctgcaacatcacacaaccacataaaactgtcaccatgaaatactgcgctgcatgattctgttactgcttcttttattcttgcagcaatggacacacaacttcagaggatgaattcgccacttcaaggctcgtgcccagcgctggatagaaacaatgaaaacagtcttgggaacaggagcccctagggatgtgggtactgccatccaatctgacagcaaatacacctttgaattaataattttcgtacttcccacactctgaattttttttcctgagataagaatattcctctattcctagaaaggagcccaaccctgaaattgaatccaatgctacaaaaccattgaatcgtttcatcagatattcacatactaaaactaaaactaaaaccttagcttcagattggaggtacagttttcaaaacagctattagacattgtcagggatctttaaccaaggatcagagctctacaaaccctataaaaacgtacgtagaagtttgatgtgtacttttctggaaggcggttttagaatccacagagtgctctctgacctaaaaaagtcaataaccaaccataaagttgtttctttaattatgctggggagaaaaaaatcataaagttatgccagttgaacagaatattgaaggaaaacattttccttcaatctaatgtgtttacacagaaagaatttaatgacaaacttttactacaacagaaaaaaaattttttaataaaagataagtttgattcatgcatgtaattgggaagcatttgttcttattgttgttacatattaatgtacaaagagattctttctcctatgaatgaacataaaaacctggtagaaacaagcccattctcaggcttataaaacaagcctttacagataattatgttttattactcttcattttatggggattgtgttatacaaaacaaataccagacgcctatttgttttattcgtttcagggcaaaaaaaaaaaaaaaaaaaaatcctacaagtgcctctgtgaagagaactgcttttaattaaacacaatgcacaaggagcacataaagttaatactgtttgaagccagcaggtagagagtaaatgcattgaacagcaactgctgaatcccccttcttctcccggctgctgcactgaaaacattcccaggcttattacttgggaactcaaatcagcaagggatactggaacaaggtcattcatggactcatcttggggaaactaaagccaatgtccatggacatgttaaacttggaagtgagaaaacaaaacaaaacaaaaatgtattttaagggcacctgtattaaaccagactgcacattaactcttctttatgaaatcgggtagatcccttctgagccatttggctaaagctgttaagatggaatgaaccaggttcatttctgctacatcaaaaaatgcaacgagatttctggcacggttcagacttaatctgcagccaccacagaaggacatgtcaaacagtggctgctatctgattaatatagtaatgcttaaaaaaaaaaaaaaggtaggggaagaaaggggggagacctaaagaaaagaacagtcaaactaaaatttgacagtttcttcctgaccccaaaaaaataaatcagatctgttcaactgtgggttctaatcagaaagtgaaaattcaacatgcagcattttagccccacaatgagaaaaatgtgatgccttctcttttttttttttttcctctgcttttgttttcttgtttacttttgatcaaatcatggtaaaacccattcactgtcctggtcctagacttagatattatctggccagttatgagctgtactcactagtgccaagagagaaaataaacagtttgaaagcaccgtgtgaagtaatatgaaacagcctgaaattgtatctggcagcccgctttccacaaagaatatccatacacctttaactagtcacacttacttaaggggtcacaccccaccttccgctactggcatttctgaatctcagagtagtcttgattcaaggagaacgtgtgttattcttttacacgagactgatcatttcttggctagtgtaattcagtcttttgaataaatggaaaaaataaattgtatgttatttttatacagaaaaaaaggccttaatatcataaggtttttttatagccctcaaaactgatttttaaatggaggtaggcaactgagaaaataagcatttaaattagttttcaccccaaagccccccaaaattttgcttacaaaattagggtactcctcattctcaaagaattgggggtgaatatacagaaaaagactataatcaagagtgaaatgccaaattttacactcagttataaactaatcgaaggagcattttcacagcagactcccttatagctgtaaaaacagaatgagggaaagatctatatggagtgacatggaatcgtgtttgatatatgattaatcttcttttctaataagagaaattacaaaagagtatatctatgccatgatcctgttttcaagaagataaacagcatgtgcttagaataaaatatatccactaaactattcaaggtggttatgggaaacaaatgatagggaactttcactttctataatgtctgaactcaacaatgctacagtattacttttgcaatctagattttaaaaaatatgtccttttttaacacattcgccagattattaaaaaccttgggtgttctctatctgaaaagtgaaaggtaaaattgagcttctgagatgaaaactcttatgtgctagaagggtttcacttaaatgacagtaggaggttttacataggatacgggagagccagaggacaggaagcatgtgtggtgtgcgcgtgcatgagtatgtctgcctgtgtgtgcaagcacaagccttcagaggaaagagggagggttactgaaaaaaagagtagctaaaaggaagaagcagagagtagggtgaggtgactcagactggaggcaaggcttttgtaaacagccacaataagtacctccgatggtcccttggtaactgctagagagaacctaggaaaaagaggtgtataaaattccatccttttcagtggtggtgagaggtgccaggtgctattctgcagagaagtgtcaaccaaaaacctgtaaaaaagagccaagtaggccacaagtggtggctcatgcctgtaaccccaacactttgggatgccaaggcaggaataccacttaagaccaggagtttgagaccagcccgggcaacacagggagatcccatctctaaaaaaataaaataaaaaattagcagggtgtggtggcacacgtcctgctggcactccagaggccgaggtgggaggattgcttgaccctgggaagtcaaggctgcagtgagccatgacagtgccactgtcatccagcctgggcaacagagcaagaccgtgtcttgaaaaaaaaaggcaaaattgtctagggatgaaccgtggaagctgaagccactctgtagaaaaccatgcatgtccctggccgggtgcagtggctcatgcctgtaatcccagcactttgggaggccgaggcaggcagaacacctaaggtcaggagttcaagaccagcctggccaacatgatgaaaccccatctctactaaaaatacaaaaaattaactgcgcatggtggcgggtgcctgtaatcccagctactcgggaagctgatgcaggagaattgcttgagcctgggagacagaggttgcagtgggccaagatagggccactgcactctagcctgggtgagacagtgagattctgtctcaaaaaaaaaaaaaaaaaaaaaaaaaaaaaaagcatgtgcctgatagatgacaccacagaattatatccttgtgaatcctgtatacacaggtttatactaagggatcagagtccaggaaagctgttttgtaccacaggtggttggctgagcatggcatgctggtgcctcattcatttgcagacagttagcaaggaggctctggtcccaagggcacagtctgtcccttccttcaatggggcagctgaaacaccaaagaagtcaaggaggggacatcttctattaggaagttgctagagagttccgctacaattctcttcaatgagttcactatctctcagcctgctccccaaaaggagacagtttcaaagaacataaactgcacccggccaagaaccgaggcctatcttagacaatacgatgcagctcaagttccataaagcaggcttgtagggatattacagttatgaccaggaacctacttgtagctaaagtgacaatcaaaggcatgagttatttcaaaggtgcaaatcatcatccgattttggtaaatctctaatttcactcctactatttcgaacctcaaggagggtaaaatatatagagatatggatatataccttctaaacttactttttctattcaacagtctctgtgttattacaaaaaaataaataagtcggccgggcgcggtggctcacgcctgtaatcccagcactttgggaggccgaggcgggcggatcacgaggtcaggagattgagaccatcctggctaacacagtgaaactccgtctctactaaaaataaaaagaaaaaaaaattagccgggcatggtggcgggcacctgtagtcccagctactcgggagactgaagcaggagaatgatgtgaacctgggaagcggagcttgcaatgagccaagatcgcaccattgcactccagcctgggcgacagagcgagactccatctcacaaaaataaataaataaataaatctaactctccctctctctctctatatatatatgtatcttctaaacttactttttctattcaacattctctgtgttattacaaaaaaattaagtaaatctaacaattcagatccaaaagtttttctgcactaaaaggccaccatgaccaaaagccactcattcaacaagtatttcttggagacccactataaactcagcactgggttaagtgctgggaaacagattaaaaacaaatatacaccatccctgttctcatgaacctaattgttattcaaggttataactaacacaagacttaatctgagcccaagtcgagtataaagtgtgaaatatccaaataactgtcattaaaatatatttggaggaaaataatgcagagaaaacatttatcaggcacatttttccaccatgaaaggaaatgctatatactttgatcacaatatttttttgtctgtcaccctaggtctgtatttgaaaaggagatatagaaaactaaaagtccagaatataccatatcttaccttctatttgggatctagaatttctagactaaagaggaggctacaaaaagttaatcaaatatgatatttactaagcacctatcaagcaacctaccaccttggaggtggactctgggatacagaggagaatgaatcagctttacccctgaaagtacagaaacctagacagttaaaaaccaaataattataatgcaaggtagaatgagttaaggtcccaaatgggattcaagggctacagccactgacttactgcccctgtctaaattccagaattttccaaggccctgaaagacataaggaggacgatccaagcctgaatgcctggacccctaaaattatacagggcaagagaataccgggactagggggactttcgaaagtccctccgcacgtgttggaaatcaactcttagattaccatctcacctgccggtgtggacagaaaaacgtgtaatacaagcacctgatgatgaggctggtgataaccagggaatgccctaggctgaagggcaggccaaatcactgctgatttattctctgctatctgaaaaatcactaggccatttgtaaaacccccaagggggactaaaatgacaggcttcaaatgacagttcttacaccatgtcctgaataggagcaaactgagaaagctcccaggccacaccatgcctgggagttccaaaagtgagtatcttatactttcacagacatgtcccaaaaatccaattaattcatctcatctaattaaaggagttcattggaaatgcaatatggtatttttatcgtgctgctgcttgaatctccaagtcagtgaactagaagaaagaaatttttattttgtggagaagatacaagaaaactttgggaaaagaaaggagaggatacactccccccaccccccaaaaaagccctttataaaacagccccttgatgcttggcagaaaacaatatacaccacatgctccagaaaaattcccagcaaaaaaaaaaaaaaaaaaaaaagatttgaaatttgaatacatgttccacatacaaatacaggcctataatcatcattgtgcataacatacataccctgcttcctgtcttgagccaagcactatcaaatttgggatcagacattccatctcactttacttatacttagtgaaccatttgccagagtctctttttgaacagtggatgttagagaaccctctgtataattctgtaatgtataagaagaatttaatcctgttctaacatgctttttttggatatggtgaagtttcaaggaacacagatgacccaatgacagcaaagcctgctacaatgtggaactggataggaatcagatcacatctggatttggtggccaacacggtatcacagaaaggctcttacaatgtgtttattcataattgcagctttgtctcctgagaaaaagaatgaaaacttaagttccaatatgtctgaatgctcccagatcttcaaatcacaggctagaatttcttctctaagttttaccttggccctgttataagtttatcctcaaggataggcatacactgtttaaacttaacatgcagaaacggtgcagaggtctgggtcctgctgctactgataatgccatcctcaagaagaagccatcagttgttagcagcccttcaaattgttgaaagtagaaagtcattcactgttatcgcgcttcctgatttgctaagtgcccctgcacggtggaatcacttgcttggctacctggattgctagaaaagaaaaatagttttcccttctctatctcgcacaggtttatctctgaaagctatctcaggtgaccgacccccagcacatttgctacccgttttaatgttttttcaagaggcaggaacaagacctctgtgactgctcagcttcacagaactagtgggaaacataatacttttgtaataggagaacgaatttttttaaagacacaaagtcatattaatgatttgtactctcggttgaacaacatctgggaaataaaaatctactgtattttggcaacagttccaacaggtggttggaattctgggcacttgccaaaccaccaggagcttctatatgactggcaagctaatgtacaatattgcacactacaattataatgagctgtaaacaggtcaaatgaaagaaatgaaattaaaaccatgataaacacatacaaacggtaagcctgaagttacaggcatcaaatgtagtttaatggaacagacagaataataatgacagtaacaatagtttcttattgagtgtttactatgttccatgcactattctaagcatattacatgtattattactcatttaatccctgtaacagcaaccctatgaagttgaaattgttatctccattttacaagtgaagaacggaaacagggaagctgaccaaggtctcgtagctagtgacagagtcaccatctgaattcaaaccagaacccttatgtgtaacctctaagcaatcctcagctggaagtcaagagacgtgtgttccatttcggattcggtcacaactacatgaccttgggcaaattgctcaacctccctggatctctactttttgtctacgctacacaagagttaaactagattttaggatcacttccacaatcttattgctcttctctccagacaaaactgtctgatatcaaatatttggagtcagttgaacaccatgccctcctccctgagcaaacatacaacacacatgcagacatacatgtgcatgtacagatgtgacagcttcaatcagaggtctctgtgtaggaaaatcagatgaggaaaactgaggcccaaagaggttcaaacctcaccaacactccctatattctcacttcatatttttcatccaagggggctcatttcttagcttattttcatagaaacctaagatttgttttgacatctaatccttttgccctctgttatccctgcttgagttactccttagatatagctaagtctaaactaagtgcaggaaaacactactccaccttttaaccgtactaagcattgaggtacttaaattttaacttatcataaaatactgttcttttttaaaaacatgtaactctataatctaaatacaaaaaatattatacatttccactctgaatcaataaaagactgactgccctgcattgacaggtttgcaacattgcacttgcatacttaaaaatgcagttatcataaaaagtgttgcttaaaggtagctttttcaatgcaggtgtgaattttaaagacacatgtagcatataagaaatggtgttttcaagaaaaatttactctctgtcagtaaagcaaaagcatctcagtattagattccctctgattgaattttcagattgcttcagatatacagacctaggaataattttggaaaatggccttcctaatcttttgtaaaaacatcataaaacataatttctacttaatcaagtgtcatatgattgtcaccaaatctgaatcaatttttaagacccactaagaagtcaagtcattgcaatacaggacaccctctattttacctatgcaccttgagtacttctatgcaatatcccacaggattctacaaactaaacaaacaagccacgattttaaatggaggaaatggaggccagcggaaggaacaattgtacaccttccctttgcttttccccgctttgccttttaattaaatgataaatctcaatatgaattcattagcagcctgatagctcaattaagccctgtgttactgcattctctggggcaatgcttcaatatcagttagcagagtttgaacgtaacctgagcaaaaaatgtgagccaaaagttttattctatcaatcttttgggagaaaaactacaattaaagggggggaagtttcaatatctacagactgttaaatgataaaaagatcataatgttttttcctgtaccaataaattatttggatttgtgttatgcagcaaaaccctttggttcattttaatttggcttcagtgatacttatatcaaacacaatagtaaaaatagaaaaagaaagaaaagaggccaggtgcactggttcacgcctgtaatcccagcactttgggacgctgaggcaggcggatcacgaggtcgggagatcgagaccatgctggccaacatggtgaaaccccatctgtactaaaaatacaaaaattagctggatgtggtggtactcaggaggctgaggcaggagaatcacttgaaccagggagtggaaggttacagtgagccgagatcacgccactgcggcctggcgacagagcaagactccgtcaagaaaggaaggaaggaaggaaggaaggaggaaggaaggaaggaaggaaggaaggaaggaaggaaggaaggaaggaaggaagggagggagggagggagggaaggagggaaggagggagggaaggaaaggaaggaagaaaggataccttggggaaaaaaaggttcattgggagaaacttcccatttgaacatgacaagaaactctgggtgaaccagcaaatgaacacaatgaacttggagtaggaacaggaatgcctgagctacaaaccaaagacagtaacatttagagactccatactttgaatataccatatcaacagtagtaacattcccttcggttaaataaatgtaaatttttttcatttatgcaacaaacactgagtgcttcctgtgagtcagtcgggcatggtgctgaggctctgaaggtataatggtacgagagctcaatgtcattttcccaaggaggcctttctttccctccatatttaaagctgcaaaattcttcctcatccccactcctactttgcatccaaacgacctggtgagctttttaaaaacctggaacttcggccggctgggtgcagcggctcacgcctgtaatcccagcattctgggaggccaaagcaggcagatcacttgaggtcaggagttcaagatcagcctggccaacatgtcaaaacctcatctttactaaaaatacaaaaaattagccgggcatggtggtacatatctgtaattccagctactcgggaggctgaggcaggagaattgcttgaacctgggaggtaggggttgcagtgagcccagatcgccccactgcactccagcctgggcaacagagcaagactccttctcaaaaaaataaaaataaatgaataaaaataaataaaatctggaacttcatccctaattggcctggactggggcctggctttttcagaagctccccaggagagtctactgtacagttaaggttgagacccactgccttaacccacttccatacgttgctttacttcacagcatccagcaccttctaatatatgacaaaatgtgtatgccatgatcctcagcctccagccactaggctatgagcatctagaaggcaggtacgtgcaccttcttattcactgttgaatccccagtgcctgcacaccgtaggcactcaataagtatctgttgagtaaatcaatgaaaaaccaacatgaatcctcccctcaggttctgtgcaatctactggagagagacaaacaaacagctaactgaatggaaaaccacagctgggtgttaaatgttctatatgagcacataccaggagaatttggccttgtctgaggcatcaaggaagtgactctggaagaagtcagatgcagctgggtgctggctttccagaaagtggaaaggaggtgtgtggggaaagcggggagaaggaggaggagtgtggctctgccctggggctggggatgagaaggcaggcagagcttgcctgccttagtaacatgtgaattaactatgagacacccccaaggcccattcaagcagggtggtgatcatattttctatcagtggcactgtggatgatttctaccaatccgtcaggacactgaaatgtgtgcaggaagtgtgcctgctacacgtccaagctaggcccccgctaggagtgtgaaatgcccaacatacctgccaggacaaccataggacaagagacgagatgtcccttgttccctcctgggcccctcccttctccaaaccctaacatccatatgccacgccttaggcaggcagggccagccctagccctaggctagctactctctttacctgagcccacagcccaagtcattctagatactagtccatcaagaatagctaacacagtggccaggtgcagtggctcgctcatacctgtaatcccagcactttgggaggccgaggcggacagatcacgaggtcaggagatcaagaccgtcctggctaacatggtgaaaccccgtctctactaaaaaatacaaaaaaaattagtcgggcatggtggcgggtgcctgtagtcccagctacttgggaggctgaggcaggagaatggcatgaacccgggaggcggagcgtgcagtgagccgagttcgcaccactgcaccccagcctggacaatagagcaagactctgtctcaaaaaaaaaaaaaaaaagaatagctagcactacaggcctacaccacaggatcagaaaacttaccatttcacctaggtttaaactgatatgcatcttgaaaacccagaaatcagagttagcaacaagtagcagaaatcaaatgctaaccgaaaggagaccctgtctctctggagccttggcggaaattgctaaagttggtagacaagttttcaaatggagatcttactcttaagaccatcagtatattttattaatcatacggttttcaaaaaagttataaaacacattacttctttttctacattcttaaacaaaggacagtgaacacaaatgatgtttcagagccaatactgtaccatgttatagttcatcaaatatccacagaagctgtgcttggtgacaggcagggcagtaggtgttggacttggaagcacattcattcctgaggagggtgtagaacacattcttgggcattgggccagctgttcttcaattgccatggttctttacttcttctgggcattacattttataatttcctggcccacttccttatatttgggttaccagctgtcctttcttcccagtactatctgcaagaatccctctttcatttttaaatgtactgcttctaatctactgcaggctgagaaaccagattacctaacaggttagaattgtctaacgtaagattaaataaattctaggttagaaatccaagtgatactctagaaatcaatcatactattgtttgtgagtgtgtggtctttatgacatcagttccagctgttcaaaagcagtacggtgctgtggttaaggacacaggttcaaaagtcagagggcctcagttcatctgctatgtgtatgctcttaggcaaaccacttttaaagactgtctgcttcagtttcttcatctgtaaaatggagataaaatgggtatcttcctgctaggtggacataaagattaaagaagatacttctcattaccctgcacataggatgtgcttagatatgagttgctgttgctgttatcctcacataggatgccctcagatatgagttgctgttgctgttatcctcatcatcaactggggtcaaatatgtgcatgccaacaggatatggcttcaacagcgcctgccacagccaacttcccctaaccacagtcctctgttgcaggaagcaactttgggctgttttcacaagaggatgaccaccaagtaaatcaagagtggcaacatgacagggcagtcgtttcactgaccaggtcaccaccatacccaagacgtggcctaatatgaatggctctccccagcaagcaatgcttactggaaaagtcaatccgactggtctcctccaggccctggacgagagaattcaggaaagactggccagtggttggaagacacacacagggccagagatgctagccaagcaagacatgaaggcatagagcaggaacaaaggagcctggcccaggtattgtggtgggtcctgagaacttacgagagcagtttcagttcagtttctgccccatgtcccctcacaataaatcccaaaacttaaggtagcccaaatgattttcggctctttgcaacataagggcctgctgaaccggccgagggaggcttcccagtagctgagctccactcacacacggtgtccctccaaatgttaccctcaactggcgaggacttaaaagtcaattggaggcggggtgcggaggctcacacctgtaatcccagcactttgggaggccgaggcaggtggatcacgaggtcaggagatcgagaccatcctggctaacacggtgaaaccctgtctattcaaaatacaaaaattagctgggcatggtggcatgcacctgtagtcccagctactcaggaggctgaggcagcagaatcgcttgaacccaggaggcagaggttgcagtgagctgagatcgcgccactgcactccagcctggcgacagagcgagactccatctcaaaaagaaaaaaaaaaaagtcaactggaaaagagatcacctgcattaatagagcagtcaacctgggaacctgaaggccatggagtcaaggaagtatctgactgccccagggatccccctcaactgcttccacccctaccccacacacatgcaagccccagcttgaagacccctgtaggtctttacagaaacaatggctggacttccagggcacctaccacaatttcctgaggacttaagtatcaaagtagagataagttattgctgtggcttagttaggaagagctaagtttcgaaactaaatgaacctctgttgttgattaggaaatagcaggaagatgagtttaataataccaccaccctgtagaacacattaatgtttacaaggtacagtctcacatactccacctcatttgaccttcttaacgaccctatgagaccagtattatgatccccatttccagatgtggaaactgaggctgagaagttaaaaacctagtccaggaactttgggggatcagctactgttatggtgcagggccacaggctctcccttttaaagggcttcacagaagacaaaagggtacacaaaaagaggctgtgtatcctcacaaatttctccttttctgtccatttttaaatcacttagaatagtgcctcctttacacttaaaatcccaggccttacttagatgcccagaggtcaaagcgacctgtccaaatttacctcctatggtccatggagtcaacaaccaaagagaaaacagaaacaaatccttgataaactgcatacaattagctagaagagtaacatctacctaggtaaggcctgcagattctgaaatcccaggcaaggttatatgcacagtgcttggagtgaagtctagggatgtctgctcagtaagagaccagggaggattttggctggagaaaaacaaaacttcaaagagaacagagcagtggagcttcaaaggccccctggcaggaccaattaacacctacaaatgtttatctaggcagtcatttaatgatggctacttcactaaatgggtgttcaccttaaaaacagctatagcccagaatgggattggagtggggagttagggaggacaggacaggaagttctatattgtgttttgagagagagaccctagtcaagaagaaaacactcaacaaggtgaaacccattacagactatttctaatgaggaaaaaaaaaaaaaacaagttaaatatgtaagaaggctgggtgctgtagctcacgcctgtaatcccagtactttgggaggctaaggtgggtagatcacctcagatcaggaattcaagacccgcctggccaatacagcaaaaccccatctctactaaaaatacaaaaattagccgggtgtggtggtgggtgcctgtaatcccatctactcgggaggctgaagcagcagaatcccttgaacccaggaagcgaaggttgcagtgagccgagatcgcgccactgcactccagcctgggtgacagagcaagactctgtctcaaaataataataaacaaataaaatatatgtaagaaaatgtaaatggttaaacaaactctggtccaaccatgggttagaaaaaaaaaaaaaatcacaccttaaaaatcctattttccaaacaatttactagaacagaaaaatgcccttggataatgttaggaaaaaaaataacatccaaaaatacatttaaagtctgacttcaactttacaaaactgacagactagaatggtaaggtgaatgggtaggagtttgttttgtttgctgaagtagccccagctccaatacataagtgtctggcacaaacaagacacttaagaaaaatgtgttgaattcattatttactcaccattaattaaataataattaacctatctatccagggtacttggatatgcagagacagagccacataaacatataggtatatatatgtgctagaatagactgactacatcaaagtttaccaatagtggctaacacttataatagaattaggaaagaaatttaattatgtattccaatcttctgtattttcccaatcttccacagaggctatgcatacttttttttttcttgctttctttctttctttgaaagacaaggtcggccgggcttggtggctcatgcctgtaatctcagcactttgggaggccgaggtgggcggatcaccgaaggtcgggagttcgagaccagcctgaccacatggagaaaccccgtctctactaaaaatacaaaattagccgagtgtggtggcacatgcctgtaatcccagctactcgggaggctgaggcaggagaatcgcttgaatccgggaggaggaggttgcggtaagccgagatcgccctattgcactccagcctgggcaacaagagggaaactctgtctcaaaaaaaaagaaagataaggtcttgctctattgtccagggtggagtgcagtggtgccatcatcagtcactgcagcctcaatgtcccagactcaagcaatcctcccacctcagtctcccaagtagctgggactacaggtgtgcaccaccatgcccagctaatttttttatctttagtaaagataagatctcactgtgttacccaggctagtatgatctagaactcctgggctcaagcaatcctcccgccttagccttccaaagtgctgggattacaggcatgagccactgtgctcagcctgtgtataacgcttataattttttaagcactgtttttcttttaaagagccttaggtcctggaggcattgggtgtggtatgttccagaaacagaatattcccataggcctttcatttctattctattggatcacagtgtctacctggggcagcagtcactctgatccccatccacctgcagcgacatctccagggttcactttcacttacaatcacagagggacaccctgcaggatgctatcagtaggggaaaggtcacacagacagaatgctaatcagcttcctcacttttcttagaagaaccctaggagagaattacaagcagaatctacatagaaacaattccaatgccccttgaacagaagagttgaaggagttcagtgcttaaatgtcaggtttaggagccacctttatgacatctctgagccaaactttttcctcgggaaacatgttcataaagtaaagcaatggaaaaaagatccatatacaaacacctgactcacgcttcacgtattaaaagttaatatgtaacagggagaaactctgtttgattctttaagatggtaacattttgtagaagagaatggactttggaatctaagtacccaggtaggaaccctgccattttctcactagatgtgacactgagcttgttactttactgtctcaggggcctacattctaatctgtaaaatggggatataacctaactcacactgttgttgaaaggttctatgaactaataaaagtaaattcaaataacaggtactcagcaaatcttctagtctggagggaatcctgtttattacaggagcctggtcaaggtggaagaggttttaaataaaaacaattataggttgaatatctgttatctgaaatgaatgctagttatcccttatctaaagaaagttaattccgcacaacctgaagcatgtacatgttccatgcagggggctggcacacctgttctgatgacatggccactgcatacaacattcacattatgacctcgagagaaaaaaaacgcactattttcttcttccagagtatgaaggaagcgctaggtaattattacatggcaatagctacttctcaaacaccttgttcagaaaataccttgtttcaaatacacaatttaggctgagaaggacttggcctaaaatgcttgaaatgcttgagaccaaaagtgtttcaaattttggatttttttagattttgagatatctgcattgtatacttagagttggacatccctaattcaaaaatccgaaatccaaaatgctcatgtcagtggtcaaaagtttcagattttggagcattttggacctttggattagggaagctcaacctgtagttattaacctcatggaaacataagcttctgtgttcatgtttgaacatgaaacatgtccagaagcctgcagaagccaatgaccactttgtctcacctggttcattctgaatatgcagtgctgcaaagcgaatgcagtgaggtagcaatgaatgttcttctctccgtgaaaagaacagacaactcgggccataaaacctgggttttagcctcaattcagccacttacaggctgcgtagcctcaggcaagtcaccttaccaccgtttgcctccgtttacacaccagcaacatagcctgagaagacaccttcaagatggttgtgagcaaagcagccaggccctaccaagcacaacttctgctgtgacattggcatattaaaggtcattattggcaggagtttctagcactgtgttctgagaaggcagatcctcaagccttctgacagaaagaactaacaccacctgcaggtgtagcatctccccttttgccatccaaagttgctgtcagagtcagggtgaccaaaggtggcctccaatgggcaggacctgcccaaaccttagtaacaagccattattcgtagagtaaaatcctgcaggcccctagcttagatcacagactccactggaaaccctcatttgctaggctgaattcagtaataatacaaatgtccctgaaagtagcaaataacaccccaacatttactcagggattccttgtgattgaggttctcaggtgctctccagaaagcaggtttagaaagaggcgagaaaggaaggagagaatcagaatctcggtgtcagaagacaaacttgccaacttcataattttccatagggctggccctaccttattttttaactgtgctaattgggtttatgttagaaatgcttttgtgctattgtacaactgtggggagaaaggtgctaatattttacatttaaaacccgagaatctcaattcccacctttcattttggagaaggaaaacattcatctaaggttcactgctggatcatgaacttgctcaaggtgtctgttaatacagtttgggataatgaggaaaaaaagaaaaaagtatttagcatttttacttgccttgcacatattttctttttgctgtaagtgcatgtaattcaacttattgttcagtcaatgcacagtctattccctaaaccccttagggccaaattgaaaggttcaaaaaactcctacttagactaaacagctccacagacctacccaactaaacaaacaggcaaaatgtaaactcccagagcaagagtttgtaagtctgaggatgccctcagcgggaggtgtgtgtcagcccctgaaaccatataacaaattgtgtacatgcttttatttatttacttatcatttatttttgcaaaggttgtcctccaagttttcatcagattactgaagaattctaagagaaatcccataacaaacaccattaataaggatctccttgtggctggtgaattttcaagggtgcctgagaatagaaatgaaagactgcagatcaaggcaaaattaagggggcctgcattctggtgctacccttgtcactaaacaattttcttgccttaagcaaacccctgaaacgttctgtccctcagtttctacatctgtaaaaatcaggatgttggaagctgaatgatcacttacctccaagacccttgaagataccaggatggtgaggtacagtgttagcaaacacagaaaaagggaaataccaaaaagaattgcacacaatcttgcctgtttccagaaaagctttaaatattcacccttgctttccttggagggggtcaaagatagaagccacctctcctttccctctctttcttctatttcaaatagctgaatctaaagtttcacaataatgccctttgtagggatgtgaactatgaagttcatgcaaaagtacaataattctataaggatgcataagtagctgaaagaacataaaatacaaagaatttctctaaagcgtcactacaactcatctaattactgcaatgacttgttttagctggcattatccacatgtgttaaaatatataactgataaaaaataattacagctatcataaaaattgatattttaatataatcctgaacgtctgggtcaaaaaatgacaaaagaaatttattttctctctattacaagagaaaagtattttctttcattccttgcagcttttctatacctttgtaatcaacgtctaattttcacaaaggcacaggtgagacagaagtcattgctcttttagcactaaattctttatcgacacataatattctatttcaccaaaagcaacctttttttagttgaaacatttgtatatactctatatttgtatatactctaacttgaccataataccataaattttcaatctagtcatcaggctgcataaagtttgctccaaaggaaacttacaggtgattgcttgagggagcaaattaaactgaagctttttttttcccatggacacttgctaataagctagatggaaactgattgtgtttttacaagctattaccaaatgagtgcttagagcacccctgaagcagtctgaaacccactctgcaaaacccaaactaatgctcaaggtgactaatcaaaagtcacaccatgagtcagtatgagaagtcaaacttacacagatcacgtctacagacctaacttcaatatcgcctccacccaaaacgctagagagactggcatatcttgacttgaggagttctgcatctcacatatctaaggccatcttccagaaagcatcaatataagtagcacagtagttgctcttacgccagagcacgacacacgttgcttgctctgctagcgtatctccaaatttgagagttcttgcttcatcttcatgtgttccaaaaaaccaataataaatggcaataaagtttgtaagcaccatttctcaaagacaaataattctgctaacccactcagaggaatgagtcaaaactccaggtgtaccaggcgagtgaatgtaaacctttcgcagcaccatcccgggctacatgcaagtttagggctggaaggtatgccaaaggggaacataatgaaaatccagaagtgtccctgctaaagagatccctgcttgggagaaagagcaaacttgcttttctacgaaatgccacttttctgatcagacccaatcctgaggtcctgaccccttgtggtctttaaacataaaccaaagtgtgggtgtcatatttcttggcccgatcacaaagaggtcaaaaattagttaaatttagtaaaaattaaagttttaaagaaaccaacccctcccttcattgctgatctctagaaaatgcttccattccacagaaaacgtagaaacgtaatatttattttgggaataaaagggtaagaaagatattattcacttggattaagggtattttccaatatatataattcaaatttcctaagctgaaatctcagctttagcccttttagaaggatgaagaacagaatccttccacagaattctttgagactgctttagaagacactgaaaggttagacttcatctcgagttactccaccataaaccagacaaagaaattcctgaaaggctataagcatttttttcttacaagcacccacaggaataggtcaatgtaaatgtcgtataaacaaagcagttcattactaaccatagtttaaatgtcttttatgagaaaactgtaatccattgcaactgcacattcatacataactgcccctggatgagaggaaaatatggattcataattgatcttagtctccggcttttcttatgcctgaaaagcaaaaggtattgggggttggaaagctgaatctgagtgcttgatactttctccttcactctctatgatcaagtcttggaggactttaatttcccttccaatcactcctatagaggccctagtgtctgaaaaaatgcacagacgacaatcaaacctttcatttcaaggccagtttcccaccataccccttcctgttccaatcaggtttgcgaaacatttcccctattctgcatttcatgaatcaattgcaaaatctgccaacctctgccagttcctcttgtactcagctgagaggttccccttccttccctgggtagcacaaggctgctctggtttttaactggcgtaacgtggaaatgcactgtaggaactcactaactctttcacagccagatgtaagtgagagtctgggcggcaaccccacctactaggaaactggtccaccaagctcaggataaagcagatttgtggaatttagctttgactccaaatcccgtgtcagttactgtcacggggaaggaaaaaggaagagtgaaaaggtctacaaagtaaccaattcagttacttagcaactggacaaaacttgcctcactacagagggtaaggaggcatctcacacccattcaaagagtaacagtctacaatttacatgcaaatagataaagaaaaaagggaacgggaaatctaaattagcaactggagtttagacagtgagactgaggcccacatttaaaaaaaaaaaaaaagtttatcctaggaaagagacaggacatgtacagaaatgaatgaattaataaatgaatgaatgaatgaatgcatgcatgcatgcatgcatgcaaagccacaggcccaacaagtttacagtctcccttcataaaagtcaatgccacgggggagagaggaaagggccacacaaagttcgatacaatttaaacatttccacggctaacatgaattacaggcttacagaaaatgtgaagttgggaaaactcctgggaaagtaggtacccccgctcatgagaaaagcaaacaaaagcatcactcttggtggaaggtctctggactttgggtagatcacagcctctccgggtctctagataccctcagaaacaccctccagtacccatgcctgaaatgcagttactaaacttggatctaaccccgactcttaacaggagacacgccgccctgcaggtttcctaagcaagagggagatactgtcacctacttggctcgagaaggtgctccaggcttttcagtttgcccgaggagctccaactctctgtccccagcctctagctgcacacccgaaccggatttgctcagttccaggctcaaaggggaaagaggactgagggctcatccgccctcaccccatcccccaacttcacacctggaccaaggccggcagagcccaaggctgactcccaaagacacgccagcccagacacttacttctcatactcggtgttgtctctgtcacagcgagaatccttgtgcttttgccagtctttgccatgcttgcaggtggtgaggagcacaacgtcctccccgttatggacgtgatataaggcattcctggtgtctgatcctatccctgtcaggtacctcttccccttgaataccagcatgtacttcctgagaggagggatggtgttgaacttcaaaaaccccctctcccctcctgtcctgggatgatccttagaaaagaggggaatagaaacatcaaagttgggtcggaagttttcagtactgatgctggctttggccagcatcgcctggccgatgtcaaaccccacgtcctcggtgtagtcaggccaagtgccggaatataaattaaaaattaaatgattcctaccattgttccacaagtggagactctgcactttggatctcaaattgtgcacatactgaggtgacaactggtctctgtctaaagtatccagactcaggacaaagaggcacgcctggctggggtccgaggtgtagaacctggagccctcgatggccgctagaatgttttggtaactttcggcgattttctcccctttttgctgtgggtatacgtagactttgaagccgtttttcttgcaaagggtgaaatcgaagcaggactccatgcggcacttcttgcctttgtagatgctggagttggcatctcgcttctgccggggggaaatgtgcacgctggaatcctcgttttccaattgatcccaaggaacgaaggggcgcagagcgtccgggaagcggggccagaaatgatccggactggggtggtgcaagccattcctaccgctgtgttcttctctccggctgtggctcctcgatgccctaaactgcaagcctccgaaataaaacaaaagggcgagacaagagccagctgagagcaggatgaaatagcgttttttggcctgcatgtgtcctgcctgggtcaagaggattgtaaataaacacaagaatcacccaagtttcccaatcaacactttcagctccagtccgccatcttcccgcctgtaaagacttcaaactctccgctcccaccttctctggatgcctttccccaagccgtggactgatccagcgcatgtgggcgatttctttaactttctccccttcggtctttcatctttgggttgcacaatgcacgggagagagcggggctgaatatctcgcacccagggcgggcgagcagcggactgtaattttcttgcatgcaacaagacggaggaaaagaaagagagaggggagaaaaaaaaagctcccgatacccaatcaatggcaagacgaagtgattgccttgcctctcggattcctctcggcagcgtggaaaatgagccccgggaaggcaacttcaactcatccaccactctccgtgcagagcactccggttccaacaagtcagccgatcccgggttcagccggctagtgcatcttgcagctggggcgccgtaacctcacaaatccctgcatctctctttattcccttctgcagcggctccaagactccggcggtgtttactcctgcgctcgcggggccggcccccgggacgcgcggcggcccggctggaggcggcggcggcggcggcgctgggtggcggcggcggcgcgtcctccccgcgggcagtgccggccccgagcagcgcttcgcaggcccccgcgcgaacgctgccgaccgccgcgttcggtcgccgaatgttacccggttctgaatgttacacttacacattccattcccgacacgacagcgctgacctcatccatccacgcagcccgcgctgccattggccgagcgtcacgtccggggggggcggtgcttccgctgcgcccattcataacccccggccgcgggccgaggcgccggcgcggcgttgggggcgtagggggcgcagggagccggggctcccgggttgcaagctgccggcgggctgccgggcaggtggagcgcgggacggcccggtgcgagccccgcggcccctcggcgcgcccaggcccggatctcggcctgcgccgtgccggggaccagaggcgcctgcggaaacgcggcggccggggaaggaggcaccggcaggggccccgtgccgcgcggccccgggcgccctggagaatctggcctcctgggctgcctgccggaacgcctagagaaagatgctttgaaggagggaagcagggaggaaaggaagacttcatagaaagcgaccgccgatccgaaagctgcctctcccagccctccttccactctccgagacccagtatttcaattttctgctaagcattaaaacaatctccccttactcctcctctacatagcacatttttttaaaccaaagaaacaccccaatgcccaacaataaagaggaattattacaatcaagaggaattgttgcaattcttcatgcctgcctctgtgctaagagtgtaagacggctatcctaaatcctcattatctacttaggccgccttgcctgagccccctctgtctattatgaagaaagcttccaagagatccaatcacagagaaaaaataaattttctaatggctgcagggaaaccagttaatttaagcttgccccagtcctcaaagtgatgttattctcttggtggtggtggtggtggtggtggtgttaaagatatctcttaaggacatatgactggtagaattgccaactgtcccagctatagaaggaacacttgcatcaggaaaactaccttatgtacaattagtgccaaatagttggtccttccctcactgacctcccactccttggcccaagctcctgccactcccagtggaagaacttcattagataactcaggtaaccgaggagcagtcccgctaaagatcctccaggtccacaaagatgtgctaggctcccaaacagtatctctggtcaaagtcaaactccctggcctcagatcctgaacactgctttacagaaaacacctcccaccctctggcctagctaaagtctcagggctcgggcaagctagacagttgcctagggcagccggctgtttagtgattgtttattatgggagtgactgagagctaggagcagacacttcccggcttccctcaggctgcaaaaaccccagcggggtgtggatgaagggcagggttataacaaggcagtatgaaatgatagagtggaaagtttcagacctctgttgtttcagatttgttttaataaagcagggaaggggcatgggtgggacattactatacattcgtgaagcctctccctatttctgacctgccaaagatgagacagcttttccagatttgacttgaaccccctgcacaatgtagagaggcctgggacaggaataaggattcagtcatcttccaaatacagtgacaatgatgcagataaaggcagtgattgaaaccacatgtgacccaaagctccccccagcccaagttgctaagaacaacagttcaaggcaggaggccttctcttctgatcagggtgcagattatctcagccctgtgaagtggggctgtgggactggaggtgctctctctctctctctctctctctctctctctctctctctctctctctctctatatatatatatatatatatatatatatatatgctggagtgcagtggcaggatctcggctcactagaaactctgcctcccagattcaagtgatttgcctccctcagcctccggagtagctgggattacaggtgtgcaccaccagccctggctaatttttgtttatttttggtagagatggggttttgctgtattggcaaggctggtctcgaactcctgacctcaagtgatctgcccaccttggcctcccaaagtgctgggattacagcatgagccacctcgcctggcccctctatatcttgccagttgttttgcatgaccttagggggagctagctaccctccttgctcttttgtgttctgtttatgttttggcatgtgcttcctgcttttcttgcctaattatggctaatttccttatcccagaccccagtgttacccatctctacttgtacatcccaaagtgttgtgtactgtcagaaaaactttggtgctgacaattagagaaaacttgaattcagaccccagatctgccatttactagtaccttgggcatgtggcttaatttcagtggacctccagtttctcgtttgaaaagtcaggataataatatctttcttgccagcagttttttttttctttcttttctttttaacagagtcttgctctattacccaggctggaatgtgcagcagtgtggtctcagcttactacaacctccacctcccgggttcaagtgattatcctgcctcagtctcccgaattgctgggattacaggcaaccgccaccatacccggctaatttttgtatttttagtagagatggggttttgccatgttggccatggctggtctcgaactcctgacctcatgtgatccgtctgcctcagcttcccaaagtgctaggattataggcgtgagccgccgtgcctggcctcaatttgtaaactgtaaattgctctacatgtgtaacaccattagcctaagttccacttttcaaactccaactgtaatcttaaaagtagcccctacaatggtatcatcattttgtctcctctgttttattttttcctaacccttattagctgaaatctcctctgttcgtttgcttgttaacttttcacagtaaggaagcccctgagaggaggagcactgtttgtcctactcactcctttatcccaaatgccaagggcagtacctggcacttaagtgaagctcaatcactgattcaaatgaatgaatgacttagtaaaattcagcttcatcacagcacttgtacaaactcgaaaagaaagagctcataagtacaggcaacaaaagcaaaaataaacaagtgaaatacatcaaactaacaatcttctgcacagtcagtaaaggaaacaatcaacaaatgaaaaggcagccaacagaaggaaaggaaatatttgcaaaccaaatgctgatatggggttaatatccaaaatatacaaagaactcacacaactcaatagcaaaaaaaaaaaaaaaaagcaaaggacctaaataaacatttttcaaaaaagacattcaaatggccaatgggtatataaaaatgtgttcaacatcgttaattatcagggaaatacacattaaaaccacagtgagatactacctcatacctattagaatggctgtaatcagaaagacaaaagataacaatggggcaacatgaagaaaacagaacccttgcacactgttggtgggactgtaaattcatatggccattgtagaaaatgatagggaaattctcaaaaatttaaaagtgtaattaccatatatcatctagcaatcttacttctgggtatatatccaaaggaaatgaaatcaacatgtcaaaaagatatctgcattcccgtgttcactacagtgttattcacgataaccaatacgtggcaacaacccaaatgtctgttgattgatgaatgaataaagacaatgtggtacatatatgcaatggaatattattcagccataagaagcaggaaatcctaccagttgcgacaacagggatgaaccttatgctcagtgaaagaagcaagatatagaaacacaaatactgcacttctgtgtggatctgacccatatgtggaacctaaaaaagtcaaactcacagaagcagagagtataatggtggttgccatggtctgggagtttggggcaatcgggagatgttagtcaaagaatataaacattcagttataagacgactaagttctggggatctaacatacggcatggtgactgtggttaataatgctgtattgtatacctggaatttgctaagacagtacatcttaagtactctcaccacacacacacgtacacatacacacaaagataactatgtgccatgacagttgggttaattggcttgataatagtaatcatttcacaatgtatacatacatcaaatcatgttgaacatcgtcaatgtatatacagtttttatttgtcaatcatatcccaataaatctgatgaaaaatctttcttaaaggccccttggtagtcctcaaagcaagactcagtctgtggtttgaagtggaaatattactaaccaggattatcttcacagagggcaagctggtccattgtaaatcctttaacaatgatgtgtttcaaaccatgtaactcctctggtcaaagccctcaagggatccctgtctctctccactaagagataaagccctttcaattacctgcaaggtcctgcaggatttttcttaaccgtccctcacctcccctcaccgcatcctctcaccccatttcctgcctatatctctctccctccctcctgatctactcactgtgctccagccaggctggtgaccttgttatttgtcatgcatgggaaacatgtccctgcctcagggcccctgcacacacttgtctctgccagtctgcaccccagtccacctagcgcactccctcacttccttcaagtctctcctcagatgccaccttactattaaggccttctctaaccaccctaaataaaacagcagcaccccttctatttgccgatcccctcacccacctttacttttcttcttagcactaatcagtacctgacattctatttattattgatgtgttgcatagagaatgtgagttccatggggcaaggacttggtcttttgttcagtgttatatcctcaacagttccaacactgtccgtcactaaataaacacttgtggaactaattaattaatctgatcttattgtctgtagggcaaataagagaatatttaaggctagagttctatcatcacacacacacacacacacacacacacacacacacacacacgaagctaaagtagcccaagcattcaagccttgcttaatttccttttccagaggtactttttccccagggctgtctaaaaacctgaaaacagtgtggcacaaaaggacccagaaaatgtaaccttgaacaagtcatttcacttccctaagctttggtttctcattggtaaaatcaagagtaactgtaatatggcatgcttagctcactgaattactgtaagaatcaaatgagaacaaaataataatgtacgagaaaaattttgcagtccgcaatgcacacggcaggtgcaagatttaatcatcacactcctggacaaatgtggacacaagtacatgagatgtgatcatatttgcaagtccacagtattaaatacgtggaatatcgcccatcaaacacacactggtttccagattctttgcaaactctgaaatggtcattgactgttataaaccaacagaaaaagggaaaaacggaaaaatagccaatggaagcaaagcaaaggagactatttttctttttaatgtagaaagcactgcagaaacatatgtttatcaatggtctacaattctatttgctatagaaaaaaataattgattggctctaaaatatgaaaacaagctgaagtattggaattagtaaatgtttaaattccctaaaatgtaaccctaggtcaactggcaaggcaatccaatcttcataaacgtatacaaaatttttatttgatgtgggcacattgtaaggttttggtgatatctgatggaacctctagcagtaagcatttctagcttctagaaagaacaggaaactctgctaggtttatactgataggatatagaaggtgggaaaagacaatcaggtctacaaaagttcaggcatcctggagcagtaatgatgaatctagagattcccagccagaaaacagaagcctaatttctagttgcctctttgccaggaacctgaggaaacttgtaacattgtttctgaatgctagggcttgagagcttcatccagaaaaatgcaggctaagatgtggtgatatctttccagctgaaatagtcaaggatgccctgtatagaccaggtgggtccaggaagggaagagcttgggaaagaggaagatggaactccgctgagaaggaagcaaacaagtggaaggaaaacaagtagaagtaggaggccccaccaggcctcccaagatagccaagcaggaagctaaccaggagcaaaacaagggaaattcatgcatgtatgtgtcaaatcctgcgccaggtgctttactggtgttatctctttgatccttgcaaggttcctaagacacaggtattctccttatcagttgtcacaaatgaagaaactgaaactcaatcctaggagggggctcttggcaattcattcacatagtccttgaacggatattcattgagcagatagcctgtaccagggggtatctgcctagagtcttttgtcatttacaaaacactttcagaagaatttttgtttgaatatcaccggaaccccgcgaagtaggaaaagaacattatccctgtttgacaaaaaattaagaatctggtcgtgtttttgttttatttttttcttcccgagatggagtcttgctctatcgcccaggctggagtgcagcagcacgactacatgtacatgccaccatgcctggttaatttttgtatttttagtagaggtgggatttcaccatgttggccaggctggtctcatcctgacctagttcgtgatctgcccacctggcctcccaaagtgctggaattacaggcgtgagcctggttcaggcccggcctggttcagggtttctagcctgggcactgttggtattttgctccacataactctctgttggaagaggccgtcctgtgcattgtgggatccacatccgttgcctctacccactaggtgcccaacagcactcccacctgcgtcacaagttgggatgccaaaaatgtctcctggaagcaaaataacctccagttgagacccactaatctagttgaagaacttggttaaggtcagctaattttaatgtggagaatttagaatttgaccctcattttctggcttcatgccagggctctgccacaagactgcagcttcctttagagaatctaaatttatctcctttcttcaaggcaagctatatcagaaaaatctcatagacatctatttaaggaacttttattgagaacctattatgtgcccatgttctaggaactcagggtacatagtataaaagacaaacaaggtgtctactctcattctaatagctgagatagataataaaataataagtaggccaggtcgggtggctgacacctgtaattcgagcactttgggagactcaggcaggcagatcacttgaggtcaggagtttgagaccagcctggccaacacagcgaaaccccatctctactaaaaatacaaaaattaaccgggcgtggtggtaccgggttgcattggaagctgtagtgatttgaaatcgtgccactgtactccagcctgggtgacagaaaaagagtctgtctcaaaaataaaataataagtaaataaattaggaagatcatttcagatagttctatggagaaattaaaagaagaatggcatagattgggatgaggaagagtaagaaggctcactttaaacaggatggtcaatgaaggtctctgtgataagctaacatttcagcagctgccatgagactgatttggaaagagccttgggaagagtgtaccaggcccaggatctggccagtgcaaagatcttaaggcagaaaggaatttgaagaattagaacagtgtttttcaaacttcagcatgtaacaaatcacttgatggtctggttaaaacacagatcgccaaatcccacccctagaatttctgattcagtagacctggggtgtggcccaagaatttgcatttctaacaacttcccaggcaaggctgatgctgcagatccagggaccactgtttgataaccactgagttaaagcatcagcagataaagtaattgtggctggagtgtaatgagtgcaggaacaaggggcaagagatgagatcagagaagctgcaggaaccttggcctgccctggcactacaggccagatgatgtgttggattttattttaggagtgggaaggccttggaggatttcaagtaggggaatgatatgatctgatttcaattttcaacagctcacccctagctgttggtagggcagcgagtcgagtttatttatctagtacatattttcaaaagtctttatttctaataaattccatctacattcctgtataatattacaataagcactattgcaaacctggatatcaagtcagaaggagaagggaaacttcaaatcttatttttatgatacaggcactatgacaaccagagtcaagataattagccctagtcactggacaattagccagtgattgctcattagcaagatagcgtgtttagtatttatcaaaactatgcatttaagctgagacttttgtctctgatgtaaattctgatgtttgatatactgacatgctagtctaatacatatttggctgtgcttttcatgtgtgtttaacaacttggaatgagctactttttccagtgataggacagcctcttgtgggtgttttctgagggacaaatggtgacaagaaattgcccttctctaagtcaggatgccactgtaggattctcataaaagttttactgacccctagtggaagatacagaagctctaccctgcttgcttatcttggtatcttctgttttctttaaagattttcctaaagaatgtgtgtgccacatagagactcacaccctgccttctagagactcacactccaggaggagaaacagacatggaaagaaataatcaccataaaaccggctccgtgctgtaatttacaagggaaggaagaggctacatttgtgcgggtccttattaacatttgtagatccatttatagatggagtcactggaagaaaatgagaaatgaaaatgtcaactattgaaggtgatgaaatcaggaagtcacccacaattcatgtacatttttcctgttggattttagcactttttattatgcaattgtctgccaacgatgccttgacttcttttttcttctttttaaacttctgataccccacagaatgaagcttctctcacctgatgtcagctgaatattatttatcatctggcacttctatgcaactatggtacagtaattattggtgctcacaatgataatcatgagaccctggaaggtcttaaagtacctgccaactcactcaagtgaggttaaatcatgtccagtcctacttcagtgagttaagtgcgtttatgatagtctaaatcatttatagttggtgatctgtgtatagtgtatgggctaacttgttatgagcacacgaataagatggaccatagagctagttatccaaatgatccctggatgctccaaggttgtttctttggttgaatttcctctatttctctgaattctggtttcttgagatgtttagagcaagtttccagctcattttcacaatgcttgtagcctttccaaataggtaaaagtgtatacatatatctacaaaagtctgcatggctgggaactctggcctccgtaagccattattctgaaaacttgcaatctatacaaactaaactattcctccaattatacactctgcatgacattaggccagccccagaataccaacctcccagctattctacctcaacttctgtctcttcagacacttgctttcttcatttcccagcgagtgatcacattgtagaagtgcaggcaactcaggaactgtaaagaaaaaggtataaagaagactaaatatattttgacatatttctatgtaaatttcagcagaggccttctctctttgaaaatctgaatatttaaacctcactaaagcacactagaaatatacattctggctttaagtaagtcctgagaagggaattgtcatcagaagcataattcatcgttctctaattgttctctcctactgaggattttagcctatgatagcctaccctggctgctggcccaataattccttatgacacgggaaaaatgcagactttagtcctgtttaagactggataagcctggttcctttcttgttcattttggcctgtggagacttgttgctaatgggaaccatccatcaaagactgctcttggctcaacacagacagtccccactgctttgtaaagcttcccctccccctaccccctctccacctctaacccccaccaacttctctacctaagctctgatctgacctgtcactgccccttcccccactttgactagtctgatcttggaatttgttgcaacaggaactgccaattgctgtaaattacatgccaccttgacaaggagaatgctaatccttgaagggtttaggaagagactaccaaacttgttttgtaggtgagaacaagctccctagtcaattggaggtgacgtgactttctactgcactatggactccctttcttccaaacaacatgggacccctgggcaggggaaggggccgcaatgaataagctaccacttgcctgaccacagcccacttcctatgttcatggataagatctcctgcctgcagccttgaaaaacctttcaggtatttcccaatctggtctggtgttatagtatcagatagttgttcgactgtgtacactttaatttgtgcagaatatttacttaacgaactgcatttctttggaggcaggagagaatagtggttaaacacaacagtattggagtctgactgcctgcattcagttgtggctctacgccacactggctctgacttcaggcaagttacttaagagctctaagcctcagtttcttcatttgctcctacccgaaaaagaatgatgatgactacttcagatgcatatgagataatgcatataaaacacgtaacaccttgcccgcatcctggaggaggtactcagtaaatgtgggggttttttttcaatatttttttttagatggagtctcactttgtcacccagactggagtgcagtggcacgatctcagttcactacaacttttgcctcctgggttcaagcaattctcttgcctcagcctcccgagtagctgaaatgacaggcgcctgccaccaagcccagctaatttttgtatttttagtagagacagggtttcaccatgtggccaggctggtctcaaactcctgacctcaagtaatccacccgcctaggcctctcaaagtgctgggattacaggagtgagccaccgtgcctggccagtaaatgttaattattatgatgtcctctcactctcccatccctccccaaatctctggcagacccttaaagtgactgggtttcacatactggtttttcagcagttacatcttccagaatttgaattaacgtctgtcataattaagacggacatttcagcaaatcatgccgaaatgttgcagtggctgtgaaaggacatgttcattcatccatttacccattcagtaacaaatatttattgaatacctactgtgtcccctggtgtgcatcatggtgcgtgaaagaccaagtcttagcccttagagaccgtgaagtctacccagggagacaatggtgaacagagaaatgaacaaataagtaagtgctaaatgctagtactactcaggaaatgatacgggctctgaaatggagatgctatttaaacacagtaaataggaagacttctctgaggaggcatttaggcagggacaggaaggagccaacattgaaaggattagggggaagaatctttcagagaaagggaaaagcagatgcaaacaccctaagttgagctgagctgagctgagctgagctgagctgactggtctagaagcagaaaacagaaccaaatggctagagccttgtgactgagatacccaggccctgcatttgtgcagctcctgtctgaagaggctgttcgtgacagtaggtttgtctgttgtccacatgaaaaggaagctctagagattcagaaagactaaggtaaggggcttgggggatgcaagcccaaatcttctattcttttccaacccctcactatccaatttactaagctttgtattaatgctttcatccaggataaaactgacctcttctgggctccacttcactctgtggggaactcaattgtagcatctttaaaccattactgtgtctattcttttatatggccacctcccctataggacaacagtgccaggagaagtggatcatgtctactgaatcctggtaactccagcatctagcacaatgcctacccttagttgggggccttataaatgtttgttgaatgaatgaatcatcactgaatttattgtgcttgctgttgccaggcaataagctaaatgctttaaatatattaacccaattaattctctttacaactcagaaggtatgtactattattagcaacattttacaaaagaaactaaagcccagagaggtatgtaattcacttgagctcttacagctgagaagtactcgagctgggatttgaacttaggcagtctggctcaaaagcccttgctcttaactttgtcacagcagtgcttctcaaactactgtctatgagaatcacctgcagaacatgttaaaatacacattccagggactcattttgcagaattttttttttttttttttttgagatggagtttcgctcttgtcacccaggctggagtacaatggcgcgatctcagctcactgcaacctccacctcccaagttcaagcgattctcctgcctcagcctcccgagtagctggaactacaggcatgtgccaccacacctggttaattttttgtatttttagtagagacggggtttcaccatgttggccagtgtggtctcgaactcctgacttcaggtgctctgcctgcctcggcctctcaaagtgctgggattacaggtgtgagccaccatgccaggccactttgcagaatttctgattcagtagttgtattagttacctagttaccatctcacagtttctgtgggtcaggaatctgggcactgcttaactgggcactgtagcgcagagtctttcacaaggctccagtctacatgttaggggctgcagtcacctcatggcttgactggaggaggaaccaattccaagctcatgcccacggctgttggtgaacttcaggtcctcactggctgttgacaggagatgtcagttctttgccacatgggcctccccaaaaggctgttctcaatgtagcagatggcttccctcacagcaagtgagggagagtgtggccaagactgtagccaaatccttttgtaacctcttctcaaaaatgacatctcggccaggcacagtggttcacacctgtaatcccaacattttagtaggcctagcggggggcaggtcacttgaggtcagcagttcgagaccagcctggccaatattgcaaaactcttctctactgaaaatacaaaaattaactgggtgtggtggcatgtgcctgtaatcccagctacttgggagactgaggcaggagaatcgcttgaaccctggaggtggaggttgcagtgagctgagatcgcaccactgcaccccagcctgggcgacagagtgagactctgtctcaaaaaaaaaaaaaaaaaaaaaaaaaaaaaaaaaaagacatttcatcacacttgcctagtcttagagaattcccacaaccctagatatggggtggacccaagaatgtgtattttttaaatttattaaataaattcaaaaatttataaaactatagtccagggtggggggctggcttctccacatctgcgggttttatctggagtactttatgcagtgactaagaatgtgtatttctgacaagccctcaagtcatgatgatcctgacagtggaggactgctttgagcagcaccagcatactatactgaagatgtcagtgagtgaatgaacaaatgaatcaaggatccaacaaacacatatccttggctgggcgcagtggctcacacatgcaatcccaacactttggaaggctgaggccagaggattgcttgagcccaggagtttgagaccagcctgggcaacgcagtgagactttgtctctagaaaataatttaaaaattagctgggtgtggtggcacacacctgtggtcccagctactctggagacagaggcgagaggatcacttgagcccagaaggtccaggctgcagtgagctgtgatctcaccactgcactccagcccaggcaacagagggagaccttgtctctaaataaataaacaaaataaaaatgaaaacaaaaagcctattcttgactggatcatatatcacattttcatagggtctttcttctccttggctgttttcactgccacttgcattcccaaaggcacctgtcaagatttgtcaagaaggtgaccatgaccctaggaaaccaggtgttcactatgtcatgaaaatggtgggctcacctgaaatggatacatcctatcttccacttctcagaagtcttacctccaggagctataaaacctttccctgacagccaaaacttgcctggtgagttatagactcacagagcaaggaagaatgatttcaagagattccctttcctgcttcctgcttttaaggaggtataataagagaagcaaattttaactctactggggtccttaagagcctgaccagagagtggcttccaaattaaagcagatttgttcttcctgccgaaatcagacaggactccccagttggtcttcccttggagcaacttctctgaccttgcttcctaagcaccggctgtgtttgaccccctgctgcctggtgagaagcggatgggctctggaatgctggtcccagctctcactgaggactcaagagacaagcagcatacacttcccctgccctgcctgaaaggaagagtgtttgctggagctgaacagctgcctggggtgcagggaggcgaatgttgctaaatatatgttcttattgtacattggtgtgtcaagaaaaattatatctccttgttctccgcttgggtattctttaaaaaaattctgtacacaagcacggggcacctctcaactcctggcccctgcatgaagaatctgattgcagcctcatttatttttctctccacacccttaaaataaatgccctcttcctcttgtcacattctgacagcttccggtgcattctaccactcccattacacacaaggcttgggtctctgagtctctttgcctcccaggcttgctttcaacaccagcctttcttaggctgggactcagggtagcatgcctgagacggccagcggagtcttttaaatgtgtccatgaagccgggcacagtggctcatgcctgtaatcccagcacattgggaggccgagatgggcggatcacctgaggtcaggagttcgagaccagcctggccaacatggtgagataaactctactaaaataaataaataaataaaataaataaataaataaataaaaattagctgggcatggtggtgtatgcctgtaatcccagctactcaggaggcaaggatgatgcagaatcgcttaaacctgggaggcagaagttgcagtgagctgagattgcgccattgcactccagtctgggcaatgagaatgaaacttcatctcaataaaaaagaaaaaaaaaaaaagaaagaaatgtgtgcatgagtctctttaaagtgcatggataaggccaggcatggtagctcacacctgtaatcccagcacttttggaggcagaggcaggcagatcgcttgagattaggagttccagaccagcctagccaacatggtaaaacctcatctctaccaaaaatacaaaaattagctgggcatggtggcacgtgcctataatcccagctacttaggagactgaggcatgagaattgcttgaacccgggaggcagaggatgcagtgcgccaagatcgtgccactgcactccaacctgggtgacagagcaagactctgtctcaaaaagaaaaaaaaagtgcatggatatgattatatgtgtatgcatgcaaatgtatggccctaaatcagatcattattatgatattgattgggatgtttccatcaggaactcagttactaatttgaatatagcactgagattcttcccttaattgaaaagaaagtggcttgtaccagttggtctcttaatccaaggtagaaaattgattttcagatttatgaggaccaggctcctgagtattctctcagccaccaatatggaattgacaaggctccacgacaattactttcattcccttcaagcccatcctagtttctttttttttttgtttttaacttacattgggaaccagaattgccctacctacttgccacataatggtaggcaataaaaatgttttttgactgaacagctaagtgaataaacccatattctcaagaaaagctaattaaaataaaatagggtagatatattgcctaagccaagtcctgctttaagacaaactggcctattaaaatatgacaaaatggatcgattttggcaatggttattaatgctgtaaaggaatctgtattgaatgaaaagcttcctttctgtgtgaagttccttcctctccaggtgaagttgattattttgtctggtatggctcatcctgggaccttgttcatcctctgtagtaatgctgctcccatctgtgcttcggtgtggacacttatttatttacttatttttgagacagggtctcactctgtccctcaggcttgagtgcagtgacacaactatggctcactgtcgtctcaaccctccaggctcaagcgatcctcccacctcagcctctcaagtagctgggactacaggtgtaccactccgcctggctaatttttgtgttttttgtagagatggagttttgccatgttacccagtctggccttgaactcctgggctcaagtgatcctcctacctcagcctcccagtgttgagattataggtgtgagccacgttttattccaattactgatttgcatactacaagtttcttaaggagcattaactttgtgacgaccaggatgatctgtttttcacctcagcttcctggatatttagcaagtgctcattaaatgtgtattgaatgaatgggtgaaggacgagcgaattcctctagtaatgcaatgtaatatgctataatacaatttaattttgggaggaaagtttgggaaaggagaagaaaaattttaagttaaactaaagggttgaaaacaaataccacctagaaaattaatccttttgataaatcatctttgaaatatacaggccaataggaaaatggaattttatttacaatagatttatttctgttcatatttcagtgctgcttgtagtcaggaaagggaggcacacatttagaattactatattatttctgtaagcccatttgccttattctcagtaggttcactactggctggaactcattttcaaggctaaatccttcacccaagtattcaattcatttggctcttgagagaggtcattagctttcccgggatacatgtccctgcagtaatgaagtagcctcatggccaggaaaccaaaatctagtcctgcatcacagccatctccctggccctgtcctggcctcctgaagtggtggggcttggaggcaagctgccaaggctcaaggctggatgtgtgcacgtgtctcctctggcttcatggccaatatcatcaataaagtgcttctcactttaaaccttttaaaatagaagtttctcttggagatgagaaaagatgaaacttcctataaaactatatggtcaaagaataccagctttacccttcagaagctggaatgattttttttgcctcttttaactctgaagtctatgagtgactaagcagcattgctaccactcatggtcaacagaaaagatgtcttctgcctcttcctcttccaaatgcaggtatgtgtctagccaaccatgatgtgaataaaacgtccttgctggaagggatctgcatttctttatatttcttgccctcctgcagggatgactttcagtgtcctgcaggtaaacagtaaattatatattttcaaaagtttctaatttaatatctgaaacgattatgaacagcaaactttaaaaaacagatcaaaataggatactaaagagagttgtaacattatctttctccggcttttttctgatgcaagtaacagcatatccaaactaaaagtggcttaaacaaaaggtccgatcagtagcttctcacttaacaggtggtctagagattggcattggttggagaagcagattggaaacatcataaagagtctagagtttttcagatttcccattttgtaactttaatgtgtcagtgatgtctgcactaatgctaccccatctccaagcatctttgttaccccaactaaaagcaggaagaaagggaagtgacagcagtttctgtttgtgctttcttaccaaagataaaattgttccagcgttgtccaaaagcagatcacacacctaactaccaccagcaaaagagaatgcaatgaccatgacttagacggtcaataatccaccagagcaaagcctgctttccccagcatgttgctgctcaatacctaaacacaattaggattgtgttagcaaggaagaagcatgggatatcgaataggccacggatagtttcttctgtgcaggtttgttacaaaggtatattgtgtggtgctgaggtttggggtacaattgaacctggcacccaggtactaagcatagtacccaataggtagtttttcagcccttgtcccgctccctctcttccctcaagtagtccctagtgtctcctgttgctgtctttatgtccatgtgtacccaatgcatagctcccagttataagtgagaacacgcagtatttggttttctgtttttgcattacttcacttaggataatggcctccagctgcatccgtgttgctgcaaagaacatgattttgttcttttttatggctgtgcagtattctattgtatgtatgtaccacattttctttatccaatgcactgttgatgagcacctaaattgatacaatgtctttgctaccaattcagcttttaaaaattggttaacaagaaaccaaaaccaaatttggatgagagtcataccattgtctctctagcatatcataaaacaggagtagatggcattttgtggggaatcttttgggtagacatgattatcttgtaagatctattattctgaggtctagttgctttttaggtctacagggtgtctagtttttgagtatactgtatttcatccctttttgtatatttaaattaaaatgaatgtattttttttgaaagccattttagtattacccatatagcttccattcgtcttcatttaggaaaagcttttttggccaagataatccagactcaggaacagacatgaacttatacctgtatctctattgatagtcatgacattatcaataccagtatgtttccccccagctcatcctcttcctaattttattgcctgcttccaaaatgaaggctataggtagaagtcaggaagagctgaatttccagatgactaaggagtagtagaaagaacacaagaaattctacaattaatgttgattcatttgcttccttggagtaacacctcctctcattaaagaacaaccttattatcccactgtgagaagaaaatgacctcacaaaggtgaaatactatgtggcatggtaagcttccgacaagttttatttattgctatcctgatgataagaaaaataattccggttctgaaaatttatatttttacaagttacatagtactgtagaaagttcagaaaacataaataagcaaagagaagatacccattatcctattataatgggtatggtataccccaatatccattatcaagtgataatcaatgtcagtatttccacatatacacttacaatatttttccattcatatctttgtatttttaaataaaagttaaatcatataaaacaatactgtttgcaattgaaattctctctctacaatatatttcatacattaccatatggatatatacagttttactgagtggttctgtgtgttcatagttgctctacattttactcaagcaattcccctgtggatatatacattatgaagatatttctacataaaaaggaaccctgtggttcagaactttgcaacattcaaagtttttcattctccagtgagtactccccatttacagcagtgtccccaattctgcaatggggaatgcacaaccccagagtgttctttcaatttattccaactccttcttccttagtgtgagtcttggtactagtcccatgctgaactgcttttatcatcaattcaagtttccagagcattccgagcattggaagacccactccccacaactgcttcatagtagctcaggcagaacctgaaagagaatctggaaaatgtgacaatatcagcactgttcataggaattttctagaacaagtgtttctgtaaacctggatggaatcccctgggccctgaattataaaccgcaaattcaaagccacagcaacacctgctgcatccaacagctcttaggagctacttcctggagccactctgaattctccagagcctttccatccatcttccaccatcccaaacattggagctgagtgcagtttttaattgcaggagccttagtagatttacttacatatgtttttattacccaaactatagtatatgcttgaatgatttcagaatgtggccacctatcagggagacaaatatttattgtggtgagagaatatttattctggtggtgagagatgattcttatggtagctaacatatgtgtgtgtgtgtatatatatatatatatatatatatatatatatatatatatatatatatatatatcttattacttaatatgagtcaaacattttatctgaataatttccacattgaaaaaattgggttttatctgaatgatttccatgttgacaaaattggcatttcactattatattttctctgttttatgtttttatttccttctagagttccttatgagttttaaaatatgaccatgtaagtcaagcacctagctcagtgcctcatgtagaaggcattcaataaatgatatttcccctttctcttctgcttttttaaggtgttatggcttatagggcattttgatgtccatcattcatttgatcttcttttttttccttcaacttttattttaagttcagggatacatgtgcaggatgtgcaggtttgttacatgggtaaacatgtgccatggtggtttgctgcacagatcaattcatcacccaggtattaagcccagcatctattagctattcttcctgatgctcttcccacatccccatttgatcttcttaatcccgagatggaggcaacactctcttcatatatgttttatatataagaaagtattcaaatttagctgttggtactacttccttttttagattatgaattctttaaggacaaataccttccctgtgtttctttttaccaaacagctcaacatgtcaggtagaagaactgatacatagcaacagcaagactttttttttttctattgaagtctaccttaaaagtgggtggtggttgttttttgcttccagaagttttgttgctgataaaataagacaaagtactcattctaatgtgaatttatggaatgattgtctgcccataaaaaattattctccagcttggagcaattaaagtagtccctctcctctccaaattaatgtaattaatactatagtcctggttgtttatcatgtcttgataatatcacaagggaatgaaaatattggctcttttatccccttaaatagcggagatgaaactgttcgagctctaatgttacaacagctgtttctcatgtcccttggaatataattggttggtactgaggttactaaattgtgagaaattggctttggttttatgcttgcctacttttggtggagggaaagatgggaaatgttagctttctcttgtaatgaaaaggcaaaatcttccccaatgaaatggcagcttccgggtctcatctgtataattttcttcaacaaccgactgtctctgggtttcttggataacacgcctgggaaagcaagaccattctagcttccctgctaattagctctcaaccccatgcagctggctgaaatacatgtgggctttcccatgaggggctttttctggaagtcactataaagtggtctggtctccaatgacaaattcaataggggatttgagaccttaattatcccaaatagtttataggagcaagattcttttatctgaatgtctttattgcttaggacagttgttttcaatgtgtcgttcctagaccagcactgtcagcatcacctagcaactggtgaaacatgcagattttcaggcccactctagacctactgaaccagaaactctggagcagggagggtccagcaatggagtccagcaatctacggtttaatgagctctccaggtgattccgatgcccaataaactttgagaaccactagcttcgggtataaccaggttttcttggtttgtggtcaggcaatactcattagtctgctgctaacttgtccgctgtttaatcttcattagtcttccaaggaatcgagtgtgcagcgaagtgcatactcgccttcataccagcctcctcagagcaaactcactccctcactcattgtcactctcttgctcattattgtctgaggttgtagggcagtgcctctcagtctttactgtgctcatgaatcatgtgaaaaacttgttaaaaggcagattctcatttagaatggccagagcagggtctgtgagtgtgcattgctaacaagcttcaggtgctgctgctggtccagaaaccacacagaagtgactggaggagctcatatatgtgacaccaagtatatgctagagaaaatgacaactgtaaaggacacataccagttaattggtacaatataggcaatctaaataatgatgaatattataacagtttatcaggtagtgtttcttttttgttttttttctgagacggagtcttgctctatcacccaggctagagtgcagtggcactatctcggctcactgaaacctccgcctcccggtttcaagcatttctcctgcctcagcctcctgagtagctgggattacaggcatatatcaccatgtctggctaatttttgtatttttagtagagacggagtttcaccatgttggccaggttggtctcaaactcctgacctcgtgatctgcctgcctcagcctcccaaagtgctgggattacaggcatgagccaccatgcctggcctatcaggtagattcttaaacgacagacttgaatgaggaatttttccattggagaaattttcttcttctttttttcttttttgagacatgttcttgctctgtcacccaggctggagtgcagtggtgcgatcatagctcactgcagcctcaacctcccaggctcaggtaatcctctcacctcagcctcccaagtagctgggaccataggcatgtgccagcatgcccagctaattttttaactttttgtagagacagggttttgccatgttgcccaggctggtctccaactcctggacttaagcaatgggaggcctgctgccttggccttccaaagtgctgagattacaggcgtgagccaccatgcccagcccagaaatattctttagctctgcttttctactccttgggttccttgtgctcccactctcctttccacatctccttccacacaacatcctcatccttccttccttcccactcccccgctttgtccccactttgtctcctctctggttctttccatctgaaactttatctggcttctttgtttttcctttttctttttttttagacagagtctcactcttgtcacccaggctggagtacagtggcacaatctcagcttactgcaacctctgtcccctgggttcaagtaattctcctgcctcagcctcctgagtagctgggattacaggtgtgtgccaccacacctggctaatttttgtatttttagtagagatggggtttcaccatgttggccaggctggtctcgaactcctgacctcaagtgatccgcccgccttggcctcccaaagtgctgggattacaggcatgagccaccatgcctggcctatctggcttctttgttgatacttacgtcaattctcatgaactgaaaagccaaagccaacattttggaggagatcaagtgggaaagtcataagggagaacttaagaaggcttaactttaccacctaaaacagtttttcaagttgtaaatccagatgctcaccactgaattcttatttccctggtgttcaccatccaataggctatagttttgtcatcctttgggctcacctccttagatgggaaagaaatcaagtatgggctgggttttcccacgagcttccagactggcaagtttcctttaacctttgaaaattacttcaaagtttccctttgaggaaagctgttggtgtacacagctgatgtctttgctcctggatctgactcccctggctgagctgtagatgtggaaaccagggtaggggagtcactttaatgtctgctgtaagaaaatggcagaaggagactgtagaagatgtgaggaaataaagcaaaagggtaatcaatccgcaaggaagaaaacccagggcttctgtgtgagtagattcctagacagtttctttctgcctcttcttcctcccccatttctttggcaatagagattcctctgttactggtagagggtttgactgctagttgtccaggttctccgtgttttgaacaaagaattggacaaaatgtacatcaaagcaaggaagaatgaagcaacaaaagcagagagtcattgaaaatgaaagcacactccacagagtgggagtgggctgagcagtggctccagggccccagttacagaatcttctggggtccaaacaccccctagtggtttcccattggccacttggtgttcactctatgcaaatgaagtagtggccggcaatcagtctgattgattgtggaaagcaaccaataagaggctgaagtgaagttacaatggttatgcttctatgcaaaggaagacttagcccccagtcagaggctgaagtgaagttacaaagttacactcccatgtaaacgtctgatttgtttccacaattttccatctgccttccagaaaaacttgggggtggggggctttgcaaagggagtggcctctggttcttttgttacttaggcatggaaagttggggttttcctttcattttagttatacgaagtcagcgtgaaatcggcctcagtttcccctccctttggaccctattctcctgcctcacttcctccaccaggatgtgcatccctcagaagttcttataactgtcctacagttcttgagttacatggcttggaggaggagtatcagcttaaattaaagagcagaggttttccttctgtgctgtgtctttatgctcttttggcatccctggaccacattggaagaagaattgtcttaggccacacataaaatacgctaacactaatgacagctgatgagctgaaaagaaaaaaaatcatcacaaaaacatctcataattttttaagaaagtttacaaatttttgttgggccacattcaaagccatccagggccacatacggctgtgggttggacaagcttgccagcatggtgccatcagacaaatattaaaaatacacatgagaaagcattttttttttttacttatgagctaacttgtttttccttaacttttttttcttttcatgggactaaaattagagaggaaaatgaaatatcaatgttaggcagaatgagccaataagaagaggtgtgggacagacatgtgctgggaatggaggaataaggcagagggtgagactgaaagtaaaatctgatttgggtcttaaaggataaggaggaggcagcatggaacagtgataagaacatgggtcttagaatgtgtatcctgattccaacgcttactgagtgagtgactcgaagcgggctgaatatcccagtaagataatgtatagaagcactgcataagtcagaaaatacctgcaggaaatagaaaccactctagctatggtctgaatgtttatatgtgccccaaattcatatgtttaaatctttaccctcaaggtgacagagttagtaggtgaggccattgggaggagatttgttcaaggggacagagccctgatatttgggattagtgcccttataaaggaggctcgggtgagacccctcaccactcccaccatgtgaggacactcctgggaggtgctgcctatgaacaaggaaatgggtccccatcagacactgaatatgttggagccttgctcttggacttcccagcatccggatgtatgagaaataaatttctcttgtttgtaagccaactaatctatggtattttgtatagaagcctgaatggactaagatggtatttcaatcagaatagggtttaaaatagaaaaataagtggttacaaaatataggcgagatggcaggaactgaagacacagggccactaacaagcttcaaggcttctcttgcagctggcacccagttcaggaggctgcaggagaccacattcaccatcatagctgccccacagcctcaaatcggttttcacaccagctttctggtgactgcacaagctccaatttgatgagcatgtgcatcagccaataccgacactaaggagagtggccctcttcccttccactttccaatctcattagcgtacaactcattgctggactctaaattgtatcgaacttaacagccaaggagactgagaatataatttttggctttctggcccatgtgatacaagaccaagtggaggcagaggtggtggaaatggatattaacaacatgtggtataagtattaagtgcagagaatcaagaaatgctagtctgcataggaggagcaagtaatgttcagtgaagtcagaccagagattggtgtcagggttttggcagacattaaaaaaaaaaaaaatagaaatcttccctttacactggagagaaacccaatgataaagggaaatggcaaagaaggaaacataactggatatatttctcattcactcaatgaaaattaacaataagtttctattctttatttgtttagttttagtttactttctataaacagtcttactctgtcacccagcctagagggcagtggcacgatcatagctctctgcagactcaaactcctagcttgaagccctcttcctgcctcagcctcctgagaagctgggactacagatatgtgccacagtgcctgactatatctatatatttttagagatgggagtctttctgtcctgcccaggctgctcttgaactcctggcctcaagtgatcttcctgactcagcctcccaagtagttgggattacatgtgtgagccactgcgccaggattccattctaggattccattctatctggctaagattctatctgttttaggatttcattctatctggctacaataataaagataatgtcacagcttgctcacaccctgtggctggaccccgtatcttcttcccacccacctaccaaaagactgaggcccattttccgttggctctcattcaaactctgtcagttaggatcttctccttcccactcaatcctctagggtgataagcacattttccagcagctctggagtcatggctgcttacaaaaactgtgccaatccaaacaagtccagctggaaggcgctggacttcctttcctctgccatcttcccagctgaaatcacagggagttttgaaccagcagacaggagctgaagcaagagacacaagtctcatttccctagggtgaagcacagagctgttagaatggtccctcccttattctttcaaaaaactttgacaccttcaaaaatggcacaattgaagaagaaggataaacaataattgaaatggaaggataaacagtacatgatattatgaaactaaaatgaagccaaaatgttctcattctttcacctcaatataacctccagaaaaccagggaatttgtcttttatttttttttttgagacagtgtctcactctgttgcccagactggagtagagtggcatgatcacagctcactgcagcctccacctcctgggctcaggcaatcctcccacctcagtctcctgagcaaccgggactacaggcatatgccaccatgcctagctaattttttatttttttgtagagataggatcttgctatgttgctcaggctggcctcaaactcctggacaccagcaatcctcctacctcagtctcccaaagtgctgagattataggtgtgagccactgcacctggcctttgtctgtcttatgtattgttatatttccctgcaatctgtattgggggtaagagacaatgactcttattgaggtggagggcatcgtgtttcagagaaactggcactccacaactatttcatttgctcttctacattttctagcctcttttgcagtttggttgggctgtacaattaattctggccaattagtgagtggaaatgacacttgtaggccatgataattaaaagcctagagctttctccatctttcttttccttccctgaagcaacttgggaaaccattgccttgattcataatacagaagaaccctggccctctgagtcattaggagcctacccctgtcccatggcctgcatcaggttttacatgaataagagataaagttttgttgggctgagtcactgagatttcagggtttatctgtcattgcagcatagcttagactatcttaactaataaacactgcattattcatatattaattcaactgacatttattgagtactccagagtgttagtcacaagagcaagaatatttaggaactggcaaaaagataagcagctacagaagcaaattctaagagatatgaaattcaaaggacattgtcaacacttttctggctcagcttttacgaaagtcttcagagttcagtagccctttgttcaatgtaacagaagtactaactaatttgagactgccatatgtgtagagaagatgcaaaaaataagaataattgttccttacatgtttatgtgcttcacatttacaaagcctgttagaaatgcatggtctcattagaagtttatcaataagtttgtgaggatgatatgtgaggtatgattgctctcattttaccctggtggaaaatgaagcttggtcaggggagatccacattgctgataaataacagaatcaaatctgaagccaaggtctgctgtcttgagccaatgccccatacaccaagcttcctgctaacagtctgatatttgactttccatgatgaaaacataccagtatagaaattgaggtgtaggttaaggagggagaaatggggtaggccaaataactctggtgaatagttttgatgtaaagagtaaaattgttagttctgactcagtgagtaatagaagccacatagatcttaaacagagcatctttctatttaatttaccttttgctgtgccacctgactccatggcaattgccaggaagtaagcaaagaagcaagaccagatttggacatttaaatcttcagaaccaaatgcagagagaagaataacagagggctaggaagggctagggtcccaccttagtcctggccatcccctgtgatagtttctagaaaattttggaagatggcctctccctgggacagttatcaaaggcatatgttctaggattgtagacccagttcatagtaacatgaaatgataccttctaggctcagtagctaataaccacgcaaattttgtggccccaactagagattctcactacatagctggaggttttagagccacgtagagactttggcacctgattagaaaagttgttccaaggcctcagagggaggctgtgcatctctcccaggtccttgaacctcttgtttccagtgccaaaattaacaaatgttagaagcagactctcactattcaacaatgtgtaagccataaaccgaaatgacattaaccttttaagaatcaatctcagcattaatctagcacccacattccccctttacctctacgaaaagtctatttctgcaacttggcttatagcatctctagaagttccctcttgccttctatcacctaatgtctctcaattcttcaaaccctaactcaggtttctcttcttctgggaaccttctcctgtccatccctaccaagttcagaccaaacatttaaccattcaattcatatctatcgaatgcttgctttactgcagaaactgtcttcggcattgggaacacggtggtgaactggaaacctcagatcaacgggctaacttccagtctagcagaccagagtatttgcttcctgctatctgcttctataacaaattcaagtactcctacattggccctcacaatatgctgctgacatgaatccttggctatctttgctcagataagttctttgatgtcaaaagccattcatgtgtcacacatttctgatctctgcagtgccaagcaaaggagtgggctaatagatgaatatctactagtttatataagtgactaatactatcctgtgtcatagagctaatggcggtgaggaagaagagtgagggaagggatgtgtttagacttggtttgcctagagcacagacccagagatgtgttagaataatgaataataataatagtgaataaaccacaggcaccggccagggcctgtttattacgaaacacatcaaggaagtatgatggtaaacctcttctggttgagtaacttagcttatactacttgtttaagctcaccaagggaaattccatcataaaacacaactttttttttaaagggattcctaaaggttgacttctgagttgtgatttctggggacacagtcaagacttttgattacctgtacatctgatttatggagaatcatttgtgcaaaaccaagaggggcacagtatatctaagagtatagattctcctccttttagataatgtgtactgcagaattacttatagaattagttatataggaccccaagtcaatttacataaatgtttttgcacaaatgtaaaaaaaattcactaaggaattatggttatttttgaagccagataaaccctaatttcacatgaagaaattgaggcataaataccctaagtgacttgtcaaagatcatgcactcaattagtgtcaaaagctgaactgaaatgcagaactcatggcatctacctgtgtactttgcgccacatcacagtaaagtgtaaaagcatgttagggagttgcaagcatgcctttgaagccgttctctatctgtcattataaatacccagactgatagagctcagtggtgttcttccaagaatgtgaagcatagactgcagagaatccacagcaagaggggttaaaattaaacctgtgggaattaatctccaactttctaggcacgggcaaagtgagagtatatcaatcagagaagaaaaaatgtagagtccagaaaatgagacaatatcctaacatgccatagaatatggaaagcacgaaaacacggagaggactgaggtctacgcacagtcatttcccagacccccagatccttgtttatttactcccttgtgttagtttcttgtggctgctataacaaattatcacaaacttgctagctcaaaacaacagaaatatattttattgcagttctgaagaccagaaatccaaagtaaaggtgttggcggggctgtgttccctcctaaagttctgggagagaatccttcctcccctcttccagcttctggtagctccaggcattccttggtgtggctgcatctctccagtttctgcctccgtggtcatgttgcctcctccccttccgtgtgttttctcctctgtgtgtcttataaggattcgggcgaggatctctggacagcatttaggccctgcccagataagccacaattgtctcttcatctcaagatctttaattacatcttcgaagacttttcccaaataaaatcacatcacaagctccaatgtttgacatgaatattctttgggggcattattttttagccactctcccacttctattattgcacatattcattatttgggtaattatttttgacaaccctcatccccactgagagagttcatgggggccataagccttgtctgtttcactcactgctgctcccaaagcacctagcacagtgcctgggacatagtagacatttaatgatatttggtaggtaaataaaaatttattaatttcttattacatattaatttattgatgaaaatgagttttaattttattgaattaataacatttttattaataaaattaatttaaaaattggtgcaaggaagggaggaaaaaggggaggggaaagaaagagggaagaaagaacaaaagcaaggaaggtgggaaaagggagagagagagggaaaagaagataagggaaaagaagggaagaaaatatctctaactctcactagaaattctgagattgggttaaaggtgagaaaaacgaggatgcgttttagaaagctgaaggccacaattagcaagtgataaagcttttatttcaactgaggtactaaaaatccatatagtctccaatgcaacacagccctagttagatgccagggttaggttaaagagagagcaataagattcagagaagtgcatggtttgcttgcctcaaggagtttgcaatctagtggggaagttagctagctagatatttcacacacacaataatgtggcaagtgccaaataaatagagtctagattttgaaaggcttttaatgcttttggattttattctataaaacaacatttagatgagatttccaggcataagcagtaatatttaaaatttgctattttgatagtaaataacagttttatagctgctgtgtaatttcaagtacaaatatctattatgactcatgctaaactacattagcccatgggattatcctaaggggtaaattatatatttggcataaatccaaccattggaaaatactcacttgaaaaatgctcaattatgtcattcttgaagtgcattttataaataaatctgagtcttcaaatcagaatgttcttgaatgttgaccagcacctgtgaattatataagatcaaaacatcattcaatgttgaacactatcttgagtgttcattcattcattcaatcctttcataggtgtttattgagatcctactgtgtgttgttctgggagctggaggtaaaatttgaataagaatgtagtccctacttttaaagggctcattgtctatgttatccagattctccagaaagcagatgtaggtgacaaagtaaggatttcaggaggcttattggagagtaagccgtgaacgtgaaagggtgaggaagcgggattggacaagggaatcctttatgccaaaaagcagatatgacatctgtcaaaggaaagagggaggaggcaggatgaggaagagagagcctcagactacaatgcagatctgatgaagtcttagctgacccaaagatttcctgctaaaggagtcctgagttggccctggtgccactgttatactcggtcattgtctggggctgcccaaaaagatcgtggcctcagcttgaaagctgaggcagagcttgaaggcattaacagctggaggctgtcagctaactgcactccttgcagctaaatagccagttctttcttgaagggagatcaaagcgatgcaaccccatggctgccacatagtgtgatcaggatgaaggccaataaacaggcaatttaggtccagtaagggtaatgacaaggtgccatgggagcttaaccatggagcaccaaactccgacttcggtacaggaaaacttccaggaagatgtagggtttaagaggatgcctggattataagtaggagttagccaaatgaaggaggcaggggtaggcagagagtgttcaaggcaggagaacatgatgtacaaagcattgtgggagagaaagcatggcacatttgagaacatagcaagacctgctgtatgattttagtatcacattgcagggaggtgatagcaagagacaaagctggagaagtacatgggggtaaagaacggagggccttgtccaccccattaagaaattcaggcagcataaccacatacaatatggcctgtagatttgaacacacaaataccaacaatttttccccattagactttgtagagcatcctgaagaccccatattccaattctctgtgtttagatactagtgatccataggaaaacacagctatgttgcctatgaggaagaataacattcattatcacccattgctcgtttgtccactatttttattcaaggttacacagtccatctcccggtaggagagaaatcacaagactcataggtttggttggagagaatgggaagcatagagccaaggagctctcagaagcatcagaccaaggcaacagaacaaaaaactgacgagccacactgggttttgagtatcacaatagggcctggaaaagagccaagaatgttttttgctacttctaacttagagggaaggatttttaaaatgagccctgggatttcacttatatgttcctattctgagaaaataatcataaatttgaagatttataatgattattgaggacagtaatgatggctaaactctaattggtgattgccatttccatgctaaatggttcacacttgattttatataatgcttagaacagccatgttgtacctaagaggcaggaactttttttttttgagacagagtctcattctgttgcccaggctggagtgcagtggcatgatcgtggctcactgaaaactctgcctcctgggttcaagtgattctcatgcctcagcctcctgagtagctgggattacaggcacacaccaccatacctggctaatttttgtatttttagcagagatggggtttcaccatgttggccaggctggtcttgaactcctgacttcatgtgatccacccagctcagcctcccaaaatgttgatattacagacgtgagccaccacacccagccagcaggaactattaattgttctcatttttcctaggataattttttttttttttgaaatgaagtttcactcttgttgcccaggctggagtgcaatggcgcaatcttggctcactgcaacctgcgcctccccggttcaagtgactctcctgtctcagcctcccgagtagctgggattacaggtgtgtgccatcttgcccagctaattttttgtctctttagtagagatggggcttcaccatgttggtcaggctggtctcaaactcctgacttcatgatctgcctgcctcggcctcccagtgtgctgggattacaggcatgagccaccgtgcccggcccctatgaaaaaattaaagctaaaaaaggttaaagaacatgtctaaggtcacatagttaatatgcaaagaaaggttaaacaaagcattgttttaatttcaattttattttagagacagtgtcttgctctgttgcccaggctggagtggagtggtgcaataagctcactgtaacctcaaactcctagactcaagagatccttccgacttagcctcctaagtagctaggattactccttgctgaattttttttttctgtgtgtgtgtgtgttggtagagatagagcctttttttttttgagatggattccacccaagctggagtgcagtggtgtgatttcgtctcactgcagcctctgccacccaggttcaagtgattctcctgcctcagcctccggaatagctgggattacaggcatgcaccaccatgcccggctaatttttgtatttttttggtagagacggggtgtcaccatgttggccaggctagtcttgaactcctgacctcaagtgatccactcccctaggcctgggattacaggcatgagccacctcatgctgggattacaggcataagccactgtgcctggttgagatggagtcttgctatgctgctcaggctggtctcaaactcatgggttcaagagatcctcctgcctcagcctcaacattattttttaaaattacaaatgatctagagggaaactattaattttgggtatgtatatattcagaaatattaagtagttattagaaaaaaatgttttcaagttgtcattgacattaacaaatatatatgttatgatttttagtgaaaaaagtggaaagtaaaatcgtacaaacattatgatcttttaaaaaaactgcttcattgagttataatatatataccataaaatttacccaattgaagtgtataatttaatgatttttggaaaatttacagaacacaaccattaccacaatccagttctagaatatttccatcatcttctcccccttaaaaaatctttcatacctttgtgcagttaatcctcatttctatttccagtcacagacaatcctaatatactttctttctaacagatttgcctttctggacattccatacagcgcaatcatgtcatatgtggttatttacatctttcttgtttcacttagcataatgtttttgagctttacccatgttacagcatgttcaatggtttgttatttttaactgctgaatagtagttctattgtacggttatacggcattttgcttatccattcaccagttgatggacatttgggttgtttctactttttggtaattatgaataagactgctataaacattgcatgcaaatctttgtgtggacatacatacagttttatttttcttgagtatatgcctaagtggataattgctgggtcatatggtaaatgtatgcttaacttttttgtttttttgagacaaagtcttattctgtagcccaggctgaggggtgcaggaacgtgccactgcaccatcacagctcactgcaaacttgagctcccaggctcaatcaatcctcccacataagcctcccaaaatgctgggattacaggcatgagcccattagcagttcatgaggattccagtttttccacattctcaccaacagttaaaattatatatgtttttattttagccattctggtagatgtgaagtgatggctcattgtggttttgtgtatttgcctaaagactgataatgttcaacatttttaaataagcttattttccatctgtatatattcaaatcttttgcccatttttattgggttgtttattttcttacaaatgaattttgagtattctttatgtcttctgggttccagtcctttctctcagtttctttcttttaacagagtctttcaaagaacagaaatttttaattttgatgaaaaatataacttctttcttctatgggttgtgttatttggtgcattgtctaagacatctctgcctaatccatggttccaaaaattttcttctatgttttcttctagagtttttatagttttaagttctgcatttatgcccatgatccgtttttatttactttaccataatgtgagatatgaagtttttatttttttaatttttttgcatgtggatagcaaatttttccagcattgtttgttaaaaagaccatcattatcaactgaatcacctttgatcctttgttgaaaattaattgaccatatacatacgggtctatttttggactctattctgtaatactgatctatttgttcatcttgcaaccaataccacattgtcttgaattctttaatcccagtgattctccactgaaagtgattttgcccccctcccttcccatcaccaggggatatttaataaagtctgaagacattttttattgttataacagaagaggtgctactgcgatatggtgagtagaggccaaggatgctactaaacgtccttctgtatacaggacagtccccacaacaaagagttatctagttccaaatgtcaataatgcctctattgagaaactctgcttttgaatttatgatatacatctttaactcatcacataccttcaagtatattatattatttcacctgtagtataagaatcttacttcagtatacttattctccctgcccttatactattgttgcaatttttcttctacatgttataaatattacagtacatcgttattattgttttttctcttttttttagagacagggtcttgatttgtcccccaggctggagtgtagtggtacagtcacatctcactgcagccttgaactcctgggcttaaatgatcctctcacctcggcctcccgagtagctagaaggcacccagctatttttatttttaaattttttgtagagatgggctcttgctatgttgcccaggctggtctcagactccctgcctcaagtgatcctcctgccttggcctcccaaagtgctgaaattataggcatgaatcaccactcctggacattattattgttgctttaaataattgatcatctcttaaagaaattaaactaggaagaagagtatttatatttaccaattccaaggttcttcttttctttgtgtagatccaaatttccacatggtattgttttccttgtgttttaagtgaaagtctgttgctgatgaattcttttagctctatatacatctgaaaaaatttttattttgccttcattttgaaaggtatttttttggagtatttttcaaattcttggaaagccagggataatggcacacacctgtagtcctagcctcttgagaggaggtggggggatcacttgagcccaggagtcaagtccagcctgtgcaacatagtgagacccatctctaaaaaaattttttttttaattctagtttgacggattttttcttacagtatcttaaaacgtttctccactgttttctagctcacattatttctaatgagaaatctgttatcacccttatctttgctcttttgtatgagtcttttttttctctagctgctttaaaaatcgttgtctttattactagttttaataacattggttaaaatgtaccattggtatttcttttttatgtttcttgtacgtgagttttattgagcttcttgggtgtgtaagtttatactttttatcaagtttggaaaatatttagccattaccttttcaaatgtttttcagccccttctgtttgggcctccagttacatttatatttaacttgtgatgttgtcccacctctcagtaatgctctattcatttttaaataagaagaaattttaaaaataaacagcaatcataaaaaacctggagtgatcatagcaggaaccaaagacagattaagattttgaagtaccaggccgggcgtggtggctcacgcctgtaatcctaacactttgggaggctgaggcgggtggatcacaaggtcaggagatcgagaccaccctgactaacatggtgaaacctcatctctactaaaaatacaaaaaaaattagccaggtgtggtgacaggtgcctgtagtcccagctactcaggaggctgaggcaggagaatggcatgaacccgggaagcagagcttgcagtgagctgagatcacgccactgcactctagcctgggtgacagacagagactctgtctcaaaaaaaaagaaaaaaaaaaaaagattttgaagtaccaaaaatcaatgcaaaagatataacatggggagctctgggggagtgctgggatatccaagtggagtgcagactctttgcaataatgaaatggaagccaccccaaccttaaggcatctgacctaccatcttcctaaagacccaagagtgaaaagattagatttagcaccaactcagatataaagagcatgtccaattttggtctttacaacttagaagacatataacaaagtagaaaagggttcagaaaagagcagaaagatggccaaataattggcaaatagaacctctgaagaaaggttaaatgagtttgggttgtttactcagagaaagaaaggccaaagttctacttaatacttgtcttcaagagtttaaagttgggatctgactagattctacatccccagaacacagaactagctgccaccacccccaccaaaaagtaaaacatttaagatttaggattggaataacaaactgagattcaaaatagccagaattttgtttggtttttctttttccctttctttcttcctttctttcctttccttcctttcctttccttttccttccttccttcctccctccctccctaccttccttccttccttccttccttccttccttccttccttccttcttccttccttcttttttgacagagttgttcttgtgcccaggttagagtgcaatggtacaagattggctcactgcaacctttgttcaccagtctcaaacaatcctcctgcctcagcctcctgagtagctgggactacaggcgtgcaccaccaaacctggctaatttttgcattttttgtagagacaggatttcaccatgtcgctcaggctggtcttgaactcctgggctcaagcagttcacccccctcggcctcccacagtgctgggattacaagcgtgagccactgtgcctggccaagaattttttgattcaggagaaattaaggtttggaaaagtgcaccactggtagtgggatttgttcccagtgctttatgcgacacaagtacagcaccattcataatcagaagtgaattttttaaaatggtgactgaaagtccatgaagtgttacatgattactgtgaatagatccatttaattcatgtacatttgataagcagtgggctatgccagacattcctaaccccttggctggctaaagagagctggcaagggaagccagagaatcactgctcataagcatatttttcacttggtgtctgtgtcagttagttttcactgcataacaaaacatcccacaactcagtgccataaaataattatttatttttcctcatgtagggttgggtggcttgggttcagatggtagctgctgaattggctctgcatcttgagtgtttgttgcagaacctggggaaagaggaaacagctatctcaaggaaagtagtcctaatagggatgagtgaagagccaaagggcaagccccactgcacaagcacatttgagccctttgctcatgtcaaacctactagcatctcattggtcaagctcaaagtcaagggaaaggaaagtacactctgttttttgtgaaaggaactgcaaaatatactcaaagcatgtggacagagaggggtaaaaaaaatggggccaaacgtataatctatttccttctgcaaagagagaaaaagccaacttacacaggtagcccagactcaagtggcttggtattaaggtgccagttacgagactggtccatgctccaggcacattcttctttgcgttggctgtcttaagcttgattcccctcattggccttagaactgaacttgccctttgatactgctttagatgggagatgaccagaggctacaccatgggttgaggattactctaggtcagagtgatatctttacctttccccttcctccatatccttcaaaagcaaaaacctatctaccttcttgtttcttacaagaagtaagaatctatccagtcattctacttagaagcctgagcttcacccttaattcctctttttcttcatcccgtcatccaatttgttttagatctctttactctacatctgaaatgaatttctctcccagtgtctccactaccttccccatttagatcctctttgtcttttatttggattgctgcagtgaccctaactgatctgctgtcactgtccttcacctccccagtccatccactacactgcagccaattacctttggaaagagcaaactagatcatgtcaatgcctgcttaagcaaaagtcaaagaatacacacacacaagtgcacacacacacacacacatacacacacatacaataaagaataatgccaaaatctttatcaaggcactcaagggcctccaaaatctggctcccttttcagcgtcatttcgtttcaccccatctgtcctctcatcacactgggctacctattctttaaacatgccacccacttcaatagattcttgtatttgtagctgatattcgctatgcatgggatgcccttccagacagcctctgtcagaccaaaatttctaatcaaacatcactcttctttcagaattaatcattctttcctttgtgttcccatgacatgctgttcatactgttatcataacgcagatctcacaaaaatgtgcatgtatcgattactcagagaagccccaggaagaaagaagagcataaataactttctgcacaaagcagaaaagttttcaggaagcacttagcctggaagttgttctttctcttcctgaggtccagggtgttctatagagctcataccattaaattttagtatacaccaagaatctatatagccgtaagaggcagttctgcagaatagacattgtgcatcctatggcccagcactgcaaacatttgtgcaatagaaaattaggaataataatagcatgagttaaagtaaaatatccaataaacacttaaaacctgaaccttgagagcagtgacagaaaaagaaaatgacaatcctttgtaacagtatgccagccttggtataaaaaagtaagcaaacagcctagcaagggaccagtttggggcagcaaatggatggagcaaacaggcataaaaccaggagataaactagaagaattagatcccaccatgatggtgacattcccttgggtgacactgttagcaagactgctcacactataattaaattttagttacatctgcatattggttatggcttcattattaaactttaattctgaatatatatatatgtgtgtgtaatgaatatgcatatatgtatttatttgtatctatttagtatattatatctaatgtattataaagtgtgggttcaatcaagctgtttaatcttttttcttatttctattaagtcctgggtaggaaatgctgttgcattttgccaaagttagaacggactcaaccctaaattaaaatgacaatcgaatgctcagaacacacagaccagatacatcattgaagaacgtgctcgatgaacagtgtttttgggggggtgggccacatctaacaatagtttataatacagtatcttaaaagttctgtatagttttattcagttatgagaggctcaaggcaggagatcatattgtatccagtgtaaaactcagcactgtctctggcatcccatctggtgcccaatcagtgctcactgatataaattgcatgggcaccagaaagatgcccactgatgtaacctggactgtattggaaattgatgtgctccaaggaaggagaacgctagggtgctccttggacaagagcctcagtgtattactgtattgctaaatcaagtgaatggaatgcgaggtgaggagggtgcctatggcaaagatttcattactttttcacaacacaccttagcacatgtctagtctgtccagcttctaggaggatgaataattaaaaggaaatggtatgtgtccaaattagcagtatccatgcacacggagttgaataaggtgaagcagcctggaattttttattctggttttatatttttttgctttctcattctttacttaatccacctagctcagtgaaattaagtgtcacaggcatagaagtaaatccaagcatttctatccagcattaaattctttctgtatcataaatcataccttttttcataatatatagcattattgcatgatttattttcagtcttttgcaatgaataatctcaaagtcactatcctgttttagttgaaggcaagggaaactataaaatggcaccaaactcacatggaattagctggggaatctgctgtatctattattccagcttaagcagaggtgctctgtagctcagtaactgcaaaaagacccactgagagcaacccctttcatttccatggcactttacatggcaatgataatacatgacaactcaagccaacacagaacaaagtatctgtggtataagataacatcagattgtatcagtgtgaaaatttggcctaatattgcttgcttggatccaaatgtcttgcagccaacttgatttaagatgttaatgccattttctgtgggtggaaggatggagttgagattttcttttgtgtttcagtggagaaacactagatatcaaggctccatgtgggccagatcctgcatgttttgaaagggctctatgtgtgtactcattactcacctaacaaaacctttgtactcagtatgttttaactggctgaaatactagtatatttaccaattcttatatgtcccaggatatccatttttaagtgcataattcaatttagtaagtgttcaacgggcatctattatatactgtgctagacattcatgataatacaagggcaaagttatcatatagaaaagggagaaaaagcatacaaaatgctatacaatatggcaaaatgttggaggaatatatacaaaatgctttgctaaagggttctgagtagagtgacattcctagatagaagaaaggagcaaagactcaaacagccattggtcagatgctctttgcagttatcaatatttgacatgagtaagtgaatgaatgaatgatgtattttgtcagataaattacgcagggtcagtatgatgtttgccctatggaaattagaagggttggatattcaagacagaggaaaaacacaggcaataatacacagccagtaaatacacagcaatactgggttttgttggatttgaagagatttacatagagttggagtcactaaagtacattgaagtcatgcttttttagagctataaagtcaagatgagaaacttatatttaattcaggggtagcaatcaaaacttgaaaatggtatgatttacatagggcttcaggaagacggatgtagtcttgccatgaagtacatggctttggaccagagagacctaggcaccaatcttagtgccaccagttataaattgaatggctctctgcgggtaacttaatctctccaagcctcagactcttcatcagtaaaatgaagataataaacccaccatgaatatataaatccatggaacaccaataccaggataatggttacctccagggacagaaggtcaggaatggaattggtgaagtggggacaaaggagacttcagctattgctgaagcaaaaatggcaaaaggttagcattgtctgtactccatgtgaaaaacatttatattattttaaacttctctaaatgtttgaaatttttcatcaatatatattttaaaaagcctaacttgtagtcatggttgctggacgtactctttatcaagtgtgataaagccctggcacatggcagtatctcataaataggagctatttcgttactgtttttacaatgttgcaattagggcagtgaaacagaaaataaaggatgaaagagaagtggtggaataaaattgtagggcatggaggacttccacttatagccaaaatagaataacagagactgagtttgccttctaacttaaaatctcctaaaacatggacaaagtatatgaaacaaagtttttcaggactgtggacatcagacaatgaagagcagtgttcctagagagataggaaacaaattaggtgagccttatcattgctccagcttactgattgaagacagtttccaggacttggagcaggagagggaagtcaggtggatcccagtggtctctgtaagttgaggagacaagggtgagagtccagggaggccaagctttcaagcagctatagtttgcaggacagaatataagagaagtgggagctgcccagacagaggactctaggagacagaggactctaggagatctgtagaaggtacatcttgcatattcacctaagtaataatcagcatatgcacgtaaggacattacctaatgcgagaaaaacaaccatccaaaaggattagaggaaacagctcttaagatttcacacaaagccatgaagattgcctgcttacaccagcaagaacagaaaatagtactgatggcaggagtggcctgtctggagcagctgctgcaaagacaccagctgcaatggtggaggtgctgccaggatggcaagttccatggagctggtgggagctggggacaggtggaagtctcccctctttctgagttggaggggtaggacccctgcttttccaggcatagctgcagcatgcattggcctgcaggtgcccctttgcacaaacagcctgggcaccatgaatggaggtagaaagtggacaggctcctggacagaaagtggcaggtccctggtgaagcccaccttcaagccagggatagtctgaagcctgggggctgggtctccagttctgtggaccagagtgagaacttatggtgcattttccaggcctgcccatggctgcccatggaccaatcagcatgcacttcctcccctccggagcccataaaaccaccagactcagccagactagggcaaatgatgggatgacttacctgtggagaggagctacccagtgtgggtctcctcccagttgagagctgaacagacattgagacaacctgcctgcagaaaggagctacccacttcaggtctccagagagctgtactacagctcaataaagcacctctttgccttgctcaccctccagttgtccatatacctcactcttcctgaatgcgggacaagaactcgggacctgctgaatggtgggactgaaagagctgtaacacaaacaggtctgaaacatgcccttttccccatccccactccactcaccacatttcaagcatgagaaggacagaagagagaagagaagagggaagaactgtggcccttcagggagcccagacctagaaactccctgagccagggctatgacatcatctttggggctttgtgtttcctggtgtctccaagctcctgggtgccaccacattccccagtgcgcacagtggaagctgcttgtggtacacctagtccagttgcagccttgcagagagctggcacctgtgccagtgcctggacctgcctgccccaccacagccagcatgcctggctgtgcacagtggccggaccccatgctcactctctaacacacctctcaccactctttgtctggtttgcccttggcaaacatgggatcagggctggtagcatgagccaagtgcagcctgccaggctgagtgagcagaataagcccagtgggcccaagcaaaacttgggcaaaggcgccaactgccacagaggtttccagctggcaaagcaaccctccaaggatcctgtgacagtctaattcatgaagcatcaataaagtactcagaagggctttatttcactagtggagaaaaattaatcctagataaagtgcttctctgatactatataacaaattttttctttttttttctttttttttttttgagagggcgtctcactcttttcgcccaggctgcagcgcaatggtacgatctcagctcactgcaacctccacctcccctctgggttcaagcgattctcctgcctcactctcccaagtagctgggattacaggtgcttgccaccatgaccagctaatttttgtatttttagtagagacagggtttcactatgttggccaggctggtctcgaaatcctgacttcaggtgatctgcccgcctcagcctcccaaagtgctgggattacaggcgtgagccactgcgcccggcccataacaaaactttacaacaagacccaaaagaatcaaacttttaaatttccaagtaatttaaatatattccagaacaaatctcaaaatatttctaggaatgtaaaaatatatagcatccaacaaagtaaaactcataatatttaaagactaatttgacaaaagatatataatacctgtacactgaaaactataaaacattgctgaagttaatttaagcagacttgaacaaatggagagatagatatactatgtccatggatctgaagactaaatatttttaattttttccaagttgttctatagattcaatgcaatcccagtgaaaatccataagacttgtagggaaatacaatggacctatattagccaaatcaattttcaaaacgaaaaacaaaatttatactatctgattttaagacttatcatgaggttatagtaatcaagccagtgtcatacttaggttaatatagggaaatagatcaatgatacaaaatagataatccagaaaccaaagtagagagaccaacacacatatggtcaactgattttccacaaagtgaggaaagagtttcattcaagtttccaacaaatggtgccaaaaaatttacaaatacaaataagaagaaattttggtctaccttgagccatatacaaaagttgagtgaaaatggatcatagagctaaatgtgaaacatataaatatgcaacttataaaagaaacataagagaaaaatctttataaccttggattgggcaaatatttcttttttttaattttattattattatactttaagttttagggtacatgtgcacaacgtgcaggtttgttacatatgtatacatgtgccatgttggtgtgcttcacccattaaactcatcatttagcattaggtatatctcctaatgctatccctgcccccgcaccccaccccacaacagtccccagtgtgtgatgttccccttcctgtgcccatgtgttctcattgttcaattcccacctatgagtgagaacatgcggtgtttggttttttgtccttgcgatagtttgctgagaatgatggtttccagtttcatccatgtccctgcaaaggacatgaactcatcattttttatggctgcatagtattccatggtgtatatgtgccacattttcttaatccagtctattgttgttggacatttaggttggttcaaattatttctcatttatgataccaaaagcatgatatataaaagaagaaagcgaactttatcaatattataaactcttcttcaaaagacactgcgtgttggctcatgcctataatcccagcactttgggaggctaaggtgggaggatcgcttgaacccaggactttgagatcagcctgggcaacatggtgagaccctgtctctaccaaaaaaaaattagctgggtgtggtggcaaatgcctgagggtgaggtgggaggactgcttgagcccagaagttcaaggatgcagtgagccgctgtgatcatgcgactgcagttcagccttgctgaaagagtaagactgtctaaaaaaaaaaaaaaaaagacattgtgagaagaaatataaagacaaatcttacactgggagaaaatatttacagatcatatatctggcaaagggcttgtatctaggatacataaagaagcctcaaaactcaatattaataataaattatttattattattattattgttatcaatatgtttaacaaattaaaattttagcaaaatatttaaacagacatgtctccaaggggcaaatggcatataaacacaggaatggatcaatatcattctgaaaaatgcaaagtaacctatggtgatagaaaaaaagcaaatagtggcctgggcatggtggctcacatctataatcccagcactttgggaggcccaggcgggtggattacctgaggtcaggagttcaagaccagcctggacaacatggtgaaaccccatctctactaaaaatacaaaaatgagcttggcatggtggcgcatgcctgtagtcccagctactcgggaggctgaggcaggggaatcacttgtacctggaaggcggaggtttcagtgagccgagatcacgccactgcactccagcctgggcagcagagcaagactctgtctcaaaaaaaaaaaaagaagaagaagaaagcaaatagttgcttggggatgggaggacaagggtacatcctgaggcaacttttaagggttatggctatgtttgctatctcgtgtgccttatagatgtatccatgtcaaaatttatcaaattacatactttaagtgcagtttattgtaatgtaaagtgtacctcaataaagacattaacataattatagagaatgtaatcttattggcaggaaagaaaggaagaaatcaaagatgacaagagactgtcaagatttcaactttgagtgactgatgaatgtggtgtttttataaatgagaagagggagaagaaacagactggtagagataatgatgagttcattggagacatattgaatttgagatcctgatgacttattcaggtagagatgtccaacagacagatgaaatctaggtctagatttctcaagaggcatgggctgcagattttaaaaagggtggagaccacatcacaaaagtgattactgaattgctgtaaacagatgagcttgctaaagggaaatcgaactgtgtggaactttgaggaatgtctacaactgcaggcatagagaatgagaaaagagtgaaaatggagacaatggttggtaaattatgaaatgcagaattgagcatagccacaaattgaaggccatgacagtgtttcaaagattaaacaatctctagtatcaaacacagcattaaagttgtggaaaatgaagactgggcaaaaaagtggcaggatattagtaatctgggtaaaaacaaaaataaaataaacaaacaacacaactttggaaggatattagagaccaaaacctgattttgaggggttaagtattgcatggatttgaataaacagaggcacataacctcctgccattttttaaaagaacacagatggaaaggtagtttgtaaagattcatggtcaataaaagtagtttctttttttgagacagggacccactctgttgccctggcaggagtgcagggacgtcatcacagctcactgtagccttgacccaagcagttgagacgacaggcacacaccaccatacctggctaacttttatatgttttgtagagatggggactccctctgttgcccagtttggtctcaaaatcctgggctcaagcaatcctcctgcttcagcctcccaaagtgttgggattacaggtgtgagcctgcaactggccaaaagtgtcttctattagagtttgggtaatagggatgtgatttgaggtagggaagagaaaagtagcaggagggattgtagataaaagccacgtttattgtacagtggtactcatactggttgtgcattagaaccacctgggggagcgttaggacatacccatgcctttggagagtcaaagcagaatctgaggttagagcaaaacctggggagcttcagccgggtgcggtggctcacgcctgtaatcccagcactttgggaggccgaggcgggcggatcacgaggtcaggagatcgagaccatcctggctaacacggtgaaaccccgtctttactaaaaattcaaaaaattagccaggcgcggtggcgggcgcctgtagtcccagctactcaggaggctgaggcgggagaatggagtgaaccctggaggcagagcttgcagtgagccgagatcgcgccactgccctccagcctgggagacagagcgagactccgtctcaaacaaaacaaaacaaaacaaaacaaaacaaaacaaaacaaaaaaacaaacctggggagcttcaatcttttccaagtagggaggaagaacattgctggagcaagagtatcggtaggaacgaggtttctcctccaactttacacatgtgcttttggcataggaaacaaatggctcttccttgtaagaggaagaagaggaggaggacaaccaggaggagcaggagggaggagtaggaagaggagggagagcagcaggaggaaggggaagcagaactccttcttgatgttttgttgtttgttgctgtgaggagacactttctatgacttttacccccttggcttccacatataattattatttggagtcaaagtgagtgagagaaatgtgagctcttcaaagagaaaatgtaattttgaagcatctcctcttgtcttctctggattttgaaggtcataccaggcagtttctgcttcagctgtaactgagttagccacccacgccactgtcaagggtcgcctcaagcaataaaatggtgtcatccaacactagtgctctgtctccagcctgcagggggtcaggctatattgtcttttttaaacgacctcaggatgctgtgcacttgagttctctctggttttagtttattttcaagctcttccaacataagctgttattatttttttatttttattttttgctattagtaggtgactaactctgtagcagagatggataatgatatggtgggaaagacatgggctttgatggagactgaccagggctcatgtctctgctctggactttacagctataggcaatttttttttttaaacttcatcaagcctgattttagttttttaatctataatagagaaataaataatgtctgtttttttgttcattcatgcatgaatattagaaccgttgtctctctctgtatatatatatatacacacatatatacatacatatatatatacacacacacacctatgcatatatgcattccacatatgcatatatggaatgtagtagaaaaccacctgttttctcctactctaaactcatattctcagtcaatattttgcttctgacactagatgtgtgtgtgtgtgtgtgtgtgtgtgtgtgtgttttccatacattgattctctgcagacagcaaggggtatcctacagtttaactcaattctcatgctatctgtctggagatagcattagatcccacaggttaagggctcacaaccaagattgccctcacttcagatgttaactgcaagtctcaggttgtggcttgtgcttctgactgacaggctataaattgaaggttctcatgaaccttttcttgggtatgatgatttgctagaatgtctcacagaactcagagaaacactttacttatgtttgcccatttattataaaagaatacaactcgggaacagccagacagaagagatgcattgggagaggtatggagacagggatgcggagcttgcatgtcctcttggggcaagccaccttccacatgttcagcaaactgggagctaatttttgtatttttagtagagacggggtttcaccatgttggctagactggtctcaaactcctggcctcaagttatccacctgccttggcctcctaaaatgctggtattacaggcatgggccactatgcccggccctcaaaatatgtatttcttatcataaatctatatatatacatatatacatatatatatgtatatatatatatatatatatacatatatatatataaaacataacaggtgatttgaagcatagtggcatagcagtgaaaagtaaatgctagctgttactagtgtcttttctcatgcttttaaatttacttattataatcctttagaccagtggttcacaaaatgttctcttcagatctacaatatctgatctgacacgtgataataaataacatggttgagtccagtttttcccaactttttatcctcttcacctgcctcctaaaccattggtttctatttgcctttggatttgtccttgaaaaaggtccgcttttttgtggcatcttggcttctaggttggtacactgggtttctcgacttcatctgatttcagttccgtgcaataaataatagccattttagctagagttctagctatgaatagcttctttcctcataacttcatcttatatttattgcctaaaatgatagattgaaagtcattacctagcaactggcacatttttttcttgtggtctagttacttgtaatgattgactattgctgtagcttcacttgctcgtcctggtcaaaaatggatataaggggtctataaatagagaccatttacatactctcaagattatcagtgcaacttactgaaatgagttcatttgtacagaatactttgtctatcaatttatttctcacatcttcaaaaggagtagctgattcaaacctatctaggattttatacttacagtacctttattagttctgttatctcaaaccccagatctcctgttggagactggctttttgtggctctgtaaaaaaagcaactaaaatcttaaagcaagaaagaatacaaaaatttttatatcgcttcatgttcatttcccatatattgctctgtcacaaaaaattaatgctttgtactttaaaagagcctttcatccaaaaacctcaaagaactttataaataagtaagcatggttattcacctttacaggttgggaatgatgcacaaagctgttaaaagtgtattgtgcattattgccaagctcaggaaaaagttcattttaatttaatgcatataaaattaattgatttggtgtttaaaaagtgtgcacactacgtttctctaggcctcaaccgactacagatattaacaaaggtacaacaatggtaaacccaaatttccctggcttttctctccttgtgcatgacttaagacctcagcttcctgcaaagccccttatgtatatctgggtgtctctaggaggcatctctcccatgctcaagaactgtccatccctgctgggcctcctctgcttcactgagcagcagagtttccaatcaggtgctggaatgcagtttccctccattgcacagccagacactctcacaaagttaatcatgccccttaggtgcttaccaacctgtagtgatgtgggagagtgggtactcttccctgcctgtaatcttctatgatgaggcagtccaaggtgaagcatcttgaactccacttctttgcaagtggtgtttcctctcaaggaaaatagttctgtcacttcttactccccccagccccccgcgccccccacacggacagctgggctcagagacatggtctgatgttgaacattatgtcagactcagaggttagtggcttttgcatgcttgacaccatggcctgctccaccacatgctccctggtgtgcactccaggaggctgacttgtaagcaagaggaatgcagcccgtatgctcctgggcctggcgtgttacaatcaggaggttctcctgatgaacatggaaccttcacagaacttcagtgtcagaaaagactgctctgtgatcagaatagatcaagaaaacaatacccctctgtatcatattggaacacagacaaaaacatgaatgttttccaagccacaaaaatggacaatcacttagttagaagaggaaaatgctatcaggaagtgggggaaattctatactcagatatcttagtaaaccttatctagaatgagggagcaatacaatgagattaaagaagctgtttttgcctccctttgctgacagcagccaatccaagatgaagcctcttccttccttcagcctttcccctgattacccaccaccatcccaatttaagatatgctaagtcctaacatctcctcacagagactccccacagttctctatggtgagcattctggcccactataatgagcaacaaacccaacatgttcaactacaggtgtgttcttgggggttgttggctggggagcattgacatccaactgaacataacaatgtgacatgatttggctgtgccacacccaaatctcaacttgaattgtatctcccagaattcccacatgttttgggaagtacccagtgggaggtaattgaatcacagaggctggtctttcccatgctattctcgtgatagtgaatacgtctcatgaaatctgatgaatttatcaggggtttctgcttttgcttcctcctcattttctcttgctgctgccatgtggaactgtaagtcaaattaaacttctttttcttcccagtctcagatatgtctttatcagcagcatgaaaatagactaatacacaatggctcttttaccctctgatgtttgttgggtttggccaaaggagggaccattggagtgtaagaggagaatggggtcagggtacttattcccccatctccctccctcctgcaacctgtgtcctctctttccacattccagtgaccacataggccccaccgtgtcattagccctgagacacttcatcagctcttgttggtttccctacattctgaccacgtgtgtagcatctgtttattaaaagtttagtgaaccaatatgagagtgctgacaatttatagcaacaaccaaagcttccttattagattctcctcattacattctgacccttttctcttaggttgtcttcttcccggaatatttttcagtcctcatgcaaacaggcctctggcttgtctgcctcactggtttgccaggcacaccccagatagggtggaattatgcttggacaagttatccttttttgctgccctaacctaagtaataagcttaggaaaaaaaacttcaaaaatcattaaatttcaagatcaactgaccggtaggattttctttctgactgtaatgtcagaaaactgcaattgcatacgagttgtggaaatcatgtcccagaggaaaaaaattaggggtatgaagatgtatatatccaagaataaacccattttcactataaagaaagaaaaagaatattaatcaaacacatcaatgaccctaacaatgaattacctaagagatcacccttaacacattcaaagatgtttagcattttaatacttatttttttcttttaaaaccaaccactcaacaataggaaatggggaataatatagtggggagggaaagaaaggggaaagggttgaaaaatctacctagtgggtatgatgctcactacctgggtgacaggctcaattatacctcaaaccacagcatcatgcaatatactcatgtaaccaacctgtacatgtaccccctgaatctaaaataaaagttgaaattataaaaattaaaataaaacaaaactaaccacagacagattaaagtccaagaaacacagtagacaaatttcctttcatggaagctactctgcaaggaaatgccgatcctagcatcatgttttaagttttagcacactatttgttctcctcctggcttagtttggttctattattgttttaccaagaatgatacactttctttttaaatatgtgattttgaaaagctttccctacagatgcaattgtttcaaaattgcatgttggggctacatttctttgttcctgtgggaatacatctttacttatataatgtaagtcagtatgaaaataagatttgcttgaagaaaattgttttccagccatggttcaggaccacttgtagtctatcaggcagctgcaccaatgttatgtgcagaaatccactgaccccaatgtttctttcagggagacctatggatagttctagagatgtttacaagaggcaatgtgtacagtttctaaaacattttaacgtaattgaaaaataaaaaagatgaaggacaacaaaggaatctcctgcttctaaagtgctacctccaggagtcagcaaagctgtctagaggctcttctttggaggtaatttttctcaaagactgaggaaagctgttttttaccccacttgtggttaagtgtgttcatatgaactcttattttatataaacacacattatggagatggaaaattttgcatgaatttaaagattaaacatggtacattcaaggaaatttcatgtttgtggtgggctgcattgagccatggcctcagaccctatgggaacactaagacttttacatttgttattaggcaatatctataaattatatgcatcatacatagggtgatcagtttattatagacttggaaatgcacaagtgactactagctgtgtgaggcaagttacttaatctctctaagcctcagtttctcatttggggaaacgattgtacactaaactcagagtgctcgtgaagattaaatgccatccatacttagtttggcaaagttccaggcccaatatgtattagttattattattaccgtagatatattagtttaatattttgacttgaaaactgatatatcttataaaatgtggagggggcttaaagtgatctttaagaggtcatactctatactatatgcatactttacaaattatcttctttgcaaatttctgggaacacataattctcaaccaataacagatcaattttatttattgtaacttttgagaagtatgtaaggcatgctactgtaaaaataaacccaactcctgcatctatgattaattgattttgacgaggatgccaagacaatttaatggggaaaaggagtcttttcaacaaatggtgctggaatagttaaacatctatttgcaaaacaataacatgggactcttggcttaaatcatacacaaaaattaacacagaatggattaaagatgtagatgtagaagataaaatggtaaaagtcttagaagataaaataagagtaaacctttgtgaccttggctaggcaatggtttgttgaatagaacaatgtaagtacaagtgataaaagaaaaaaaatagattggactacactaaaattaagaattttacactgcaaatgataacgtcaaaaaatgaaaggacagaagatggaatgagagaaaatatctgcaaatcttatatctgataagggacttgtattcaaaatacataaagaattctgactactcaataaaaagacaaataaccaaatttaaaattggtcaaaagatatgaatagacatttctccaaggaaaatatacaaatgatcaataagtacatataaaaatgctcagcattgttagtcattctgcaaatgtaaactaaaatcacgttgagataccatctcataaacactgggatggctatcgtgaaaaggttgcaaaatgacaaatgttggtgaggatgtggagaaattgcaactttcacacattgctggtgggaatgtaaaatggttcagccactttggaaaacactctgagaggtccttaaaatgattagcatatagttatcatgtgacccagtgattatactccttagtacactccttagtatatatccaagagaaataaaaacatttgcacacataaaaatgtgtagatgagtatttatagcagtgttacctataacatagaagtagaaacaacccaaaagtccatcaactgatgaatgactaaacaaaatgcagtatatccatacagtgaagtattacttgacaatcaaaagaaatgaagtactgatacatgatacatcatgaatgaaccctgaaaaacatgctaggtgaaataagttggtagcaagagaccatatattgtgtgattgcattcatatgaaatgtctgggatagacagatctacaaagacagaaagcaggtcagtggttgccagggactgggaggagaggaggcttggagagaatggggagtggctgctaatgggtacaggattttttttttttttttttttgggtcaggtcatgaaattgttctaaaattagactgatgattgcttggccccttgaatatattttaaacattgaattgtgcatttaaaatgggtaaattgcaatagcaaagacttggaaccaacccaaatgcccaccaatgatagactggattaagaaaatgtggcacatatacgccataaaaaaggatgagttcatgtcttttgtagggtcatggataaagctggaaaccatcactctgagcaaactatcgcaaggacagaaaaccaaacactgcatgttctcactcataggtgggaaatgaacaatgagaatacttggacacagggtggggaacatcacacaccggggcctgtcgtggggtagggggagtggggagggatagcattaggagatatacctaatgtaaatgacgagttaatgggtgaagcacaccaacatggcacatgtatacatatgtaacaaacctgcacattgtgcacatgtaccctagaacttaaagtaaaattaaaaataaaataaactaaaatgagggaattgtatgtattgtttaatttcaatatggttgttttttaaaaaagaaagaaaaagaaacctgaaacaggtcttgaatgttagactttatagtcagtttcctcagtaaaggtttttaacatatagaatatatatttgatcattgctttggtcctgcttaacactatattttacagcagtcaaagtctgcatgcctgtttgagcaaattggagaccattggaaatttggatgggaatgtaattagctgagttgaaccttggccaaaaggcattgttttctaactggaaggtactattgggtttttaaaacagttttattgaggtgtaattgatatatataaaaatctgcacatatttaatgtatacaacttgatgagcttgaacatgcacatatatccatgaaaccgttaccacagagtaataaatatatccatcacctccaaaagtttgcttctgcctctctttccttttttttgtgataagagcacctgagagctcctttttgacaatttttctgtatacaatatagttttgttaactataggcactgctgtacaacagacctctcttattcatcttgcagaattgaaactttataccatttgaacaacaactccccatttatccctccttccagcccctggtaaccagaattctactctctgcttctaggaatttgatggtatttgtcctcgtgctggtggaatcatgcgatatttgtcctttgatgactggcttatttcacttaccataatgtgccagttcctaggaatagggttttctgtcccttgcataagataggaatcatacttttcaacaagctcccctttcctgttggacaagtggtacagtattgacacatggtttagaatgcaacctcctgagtgaacaacactattccttgccatgcctgaaatttctttttatttctttgccttccatccaagtattgatcgaggcagggttctgtgtagcttacaacgtgttaggtgttgtcagactatcatgttaggcctgccgctgtaatgggctgactgtctttatggaggtggagagcagaagggcaagctggtggattaaggaacagaggcacttgccttaagggacccagaggcttagcttaaaattggtgcccctggaacctccatcttattgacaaagcaagtagctgtcattgtacattacaaggccctgtcttttagacaagcagcctctgttttcttttatgcgatgggctatttttggatgtgttcttgaccattatctaatatttatatatatatataatctatatatttaactatagattatatatttatatttattatattaaattatatacatatccataacttttttttttttttgagatggagtcttgctctgttgctcaggctggaatacagtggtacaatctcagctcactgccacctctgcctcctgggttcaagtgattctcatgcctcagcttcccgcatagctgggactataggcacgtgccaccacacctggctaatttttgtatttttagtagagacggggtttcaccatgttggccaggctagtcttgaactcctgacctcgggtgatctgcctgccttggcctcccaaagtgctgggattgcaggcatgagccaacacatccagcctatatatatatatattcataacttatctggcaattaaaaatactgcctgttagtaattttaaataatattttagatggactgatgtgtagtaaaaagaaaaaattgttctgagtcagtacagttcaaatcttggtcctgccagttaaaagtactggaccttggggaaatcatgcaagctgcttctgggttttggccccctcctctgttaataggctaataattttacctatcctgtgggattgatctgaggattcaatggggcaatgtttgccaaagtgcttttgtaaagttaaaagggctgtcatagtcatttgttgcatgtggacctgtttaatgtccccagtgagactgaaggctccctgtttttgcagatcctcaggatgtgtgaggacactcagttcagatttgttgatttttggggttgttttgagggccttttggttgttgggagacaagaggtgttcaaggcacctttttctgactcacttctaaggagactgggacatggcatgggtcaagtgtatctgcgtgggccattcattcattcacctatttaataactattaactgagtgttgtttgggtctaggtgcttgggaaaaagtggttcattttactatactggcaaatgctccacttccaggagctgacattccagtggaggaagacgatccaaataatcaatgaaataaagaaatacaaaatttcagagaattttagttccactgcacaaaataaagcaagataaaaaggtaaaaagtgggggtgaagaaattattttttccccattttatatggataaatttcaaatctacagaaaaaaataatatgcaatgaatatgcattttctcatcacccaaatccatcagtattaacataatgccacacttgctttctttttcccctctatgtgtgcatgtctttatgtacttctttgtgtacatgtgtgggtttttgttgttgtaccatttagaataagttataaatatcatggaattttatctctaaatagttcagcaaatatttccaaagaacaggatctttacctgtgtaaccacaatgccatatgactttcaaaaaatttagcagtaaagcaaaaaaaaacaaaaaaaaaaaaacaaaaaaaacaaacaaaaaccgggaggcatcatattacctgacttcaaactatactacaaggctaaccagctgggtgctggtacaaaaacagacacatagacccatggaacagattagagaactcagaaataaagctgcacacctacaaccatctgatcttcaacaaagccaacaataacaagcaatagggaaaggactccctatttaataaatggtgctggcataagtataactggatagccatatgcagaagattgacactggacccctagttttaccatatatgaaaatcaactcaagatggattaaagaattaaatgtaaaacctaaaactataaatcctaggagaaaacctaggaaataccattctggacattgccctgggcaaagacttcatgacaaagactccaaaagcgattgcaacaaaaataaaatttgacaagtgggagcttattaaactaaagagctcttgcacagcaaaaggaaccatctgcacagtaaacagagaacttacggaatgggagaaaatatttacaaactatgcatccagcaaagatctaatatccagaatctataagggacctaaacaaatcaacaagcaaaaaataaccccactaaaaatgggcaaaggacatgaaaagacacttctcaaaagaagacacacatatagccaacaaacatgaaaaaatgctcaatatcactaatcattagggaaatgcaaatcaaaaccacaatgatatatcatatcacactggtcagaatggctattattaaaaagtcaagaagtaacagacgctggcaagattgtggagaaaagggaacttgtatacactgttgatgggaatgtaaattagttcagccactgtggaaaggaaagcagttcagagattttttcaaagaacttaatagaattaccatttgacccagcaatcccatcacttgatatatacccaacagaatagaaattttttggccaggcgtggtggctcacgcctgcaatcccagcgctttgggaggccaaagcgggtggatcacaaggtcaggagatcgagaccatcctggctaacacggtgaaaccccatctctactaaatatacaaaatatcagctgggcatggtggcatgcgcctgtagtcccagctactcagaagactgaggcaggagaattgcttgaacccgggaggcggaggttgcagtgagccgagatcgtgccactgcattccagcctgggagacacagcaaaactctgtctaaaaaaagaaaaaaagaatatgaaaaagaatataaattgttctatcataaagacacatgcatgtgtatgttcatcacagcactattcactatggcaaagatatagaatcaatctagatgctcatcaatggtggactgaataaagaaaatgtggtacatatataccatagactactacatagccataaaaaagaatgatatcatggcctttgcagcaacatgcatggagctggaggccattatcctaagtgaattaatgcaagaacacaaaaccaaatactgtatgttctcacttataagtgagagctaaacaacgaggacacatggacacaaagaaaggaacatgaagtctatttgaggatgggaggagggtgagaattgaaaaactacccatcctattgggtattatcctgattatctgggtgacaaaattactggtacaccaaacccctgtgacacacaatttacacatgtaacaaattgcacatgtaccccttgaacctaaaattaaaaaaaaaccactattgtagtatataacaatagtatttaacatggaatgaaattccaattttcctcagttttcccgtaaatgtccttcatagctgtttttgttactgtctgtttgtgtgggaaagtggtcatttgggtgatgaaaaagtttctctacagatgtggcatttgagaaaagaccagagtgttgagaaagaaacagttacgtggtgatgcagtgcataagcctaggcatggagaatagtaaggtcccaagatgggaatgagtggatgcgtttcgggtatcacaaaattgggcatgaacaaaagggagagtgttggccagaggagaagttggagaggcagttggtagcagatgatgcagagcttatggagctgctcatgagttgagttgaattttgtattaagtctaaaggggaagccacagagaatttttttttttttttttttgagacaagatctcattctgtcacccaggctaaagtgcagtggtacaatcatagctcactgcagcctctacctcctgggctcaagccatcatcctgtttcagccttctgagtagctgggactatgggcatgcaccatgtccagctaactttttttttttaatcttttgtagagacagggtctcactgtgttgctcaagctggtctcaaactcctgggctcaagcaattcttgtgcctcagcctcccaaagtgctgagattataggcgtgagcccctgtgcccagccaccagtgaggattaacgcctgggaaggaagctaggcacggtggctcatagatgggtgtaatcccagcattttgggaggccgaggcaggaggattgctcaatcccaggagcttgaagctgcagtaaggtatgatcacaccactgcacttcagcctggctgacagagtgagatcctgtttttaaaaacataaaataaaaaaacaacataaaggagatgccattagaaattaaaaactgagaagcaatgtggtctgattgatgttttgaatagatcattctctgtgccatgtggagaacaaactgagttgggcaagtgtgtggtaggaagaggccctttcagaatcccaggtggctgacacacatgcaggtttatctgctcccatctggtctaaccacactgccatacacttctcttgaaacctcgcaaccactgttcctatgctgaattgaaacgtccataaatctgaaaacctgaagccatcatacggtggcccaacctgtcaaacagcagtttagttttggctatccaggtatatttgggtaattccatgagtacagtattttcttatgtttttcttattattttataagaacaaatggaaaataaaacactaaatgtttgagactagagttaacaagcgtaagccccatacatttagtgtagttaaaacctaaattgaggttattaatcagttgaaagtggtaaatcttattttaagccaagcaacgttttgttcaattgcaaaggaaaagaagcttaaagaccatagacacacttatggaaatgcatgcaagaaacatctgaaaaaagtgagggacacttaggaattatatactaagttttggctcttttggacaaagtacttcctgcaaagcataaaaacccattgtatgatttttcaaacactaggttttttttaaattaaaaaaaattgttttttttagacagtctccctcttgtcacccaggatggagtgcagtgccataatcttggctcactgcaacctccaccccctgggttcaagtgattctcctgcctcagcctcccgagtagctgggattacaggcaagcaccaccattcccagctaaattttgtatttgtagtagagatgggatttcaccatgttggccaggctggtcttgaactcttgacctcaggtgatccacctgcctcagcctcccaaagtgctggttttacaggcatgagccaccgcccccggccacacatttcttatattgaattggtcagaataattaatgctaactgccacagcagacaaatcctgaaatctcgacagattacacacacaaaaagctgtttcttgctcatgtaaagtctaatgtacgtggggcacctctttctttgtagcctcaccatctggcaagtgtggctctgaaagtagccttggatgctcagaagagaagcacagaatgaggctgtctgcctgttcatgcttctgcccagggggttgggtgggcatcatcacttctgtttatagtccacaggactccctcctcccatggctggcaatggatgcaagcatttggaattcttggggagtgtcaataatttctctacaattatcggacgtgaaagtaaagaattctaaataaggggccggatgcggtggctcatgtctctaatcccagtagggaggctgaggcaggcggatcacctgaggtcgggagtttgagactagcctgaccaacatggagaaatcccatctctactaaaaatacaaaattagccgggcgtggtggcgcatgcctgtaatcccagctactcaggagtctgtggcaagagaatcgcttgaacctgggaggcagaggttgcggtgagccgaaatcacagcattgcactccagcctgggcaacaagagtgaaactccgtctccgaaaaaaaaaaaaaaaaaagaattctaaacaaggaagtcttcagggatgcttaatgtggttggccaggtacgaggggtagtatttggaataggagatgcagaggagttaagaaattaagagcactatcttcttttagagctctcttttggaaaacttccttttctctttcctcctggcctcaggttttctcccttaccttttaaaggtgaagtcattactagagtcaggcccaggtgaaagaggcctaatgccaaccaagcacttaggtcatattctgatttaggccagaagaggcaaaagggagtgtttgcggtttactatctgacttatgcacatacgggactaggcaggatttttggatcaaaactgtgggtacttataaagcctagattaatctggattacccttcataccatcagatatttgcaacagcaaaaggccacgaggcagcattcagagtccagaccagcatctactatcacagcttagcgtggccactgaagatgacaatttaaatcgtgtgaaggactaaattcagaaacaacactcagcatcaaagtacatttgttttggaggtttagcccagttgccggcagcctaaagctggtgctccctcggccggactcagtgcccagtagacggggctgaactgtggctcctgagaggaggtcagggggctgaaatgacacctgcacagggctagccagctttgtaagcctgctgtgttctgaatcctttatcttttctcctaggatcagctggagaactagaatatctatccgtgtctcattcactgtggccaggcgagatgagaggctgaccagaaactgtgattactcacatttgcttctgtggcacttaaggaatatgggtttgacaaacgatagatgagagccaaaggtttgggattatagaaatttatgtgccaaaaatatgtaatacaaatatccatgtacacaccacgacccttcccttctatctcattcctgcccccaacccgctgaccctgggtcatttcctaactatcttgcagttaggcagagaaatgtggctcattctgtctagtgggctatggctgtgagtgtttcatgcctttctctttctctctccctctctctctctctcgctctttatttatttatttatttgctgagacagggtctcactctgttgaccaggttggagtgcagtggtgtgatgctggctcactgcaacctccgcctcccaggctcaagcaatcctcccagctccgcctcccgagtagctgggattactggcacatgtcaccacacccagctatttggtagagatagagtttcgtcaagttgcccagacttgctcaaaatcctgggctcaaggaatcctcctgctttgacctcccaaggtactgggattataggcacgagccactgcacccaacatcatgcccttctcttcctttgcttatgggcctggaatccaggttttccagattctagagcctccgctgtcagcctgagtactgtgggggaacagagtcccctacaaccttacctgagtcaggcatgtaagataagccagaattaatggttcagtgtgctaagctattaaaacattttaaattttgtattaaatttttttttttgttttagagatgggggtcttgctatgttgcccaggctggacttgaacaaccttgatcaagaaattctcctgcttcagcctctggagtagctgggactacaggtgcataccaccacgttcagttaaactattgaaattttaagttttatttctggttaccatagcacaatctaacctcttatgactaatgttggattcacaataacatcttggctctgccacttgctattttgggcctctattttctcatctataaagtggaggtcacaatactcactgtaaggactgtcaaatttttgtctgccttgcatccattccttctgaacgctgctgccacctcaaaattccatgagatccttttgccgtcaatctggggatccactttccccacaacagggcagccaattagagagccacatcttcttggacacactgattgggccaaggtgtagcatgtgaccccaaaatgggcaatcagggtccattttcaggacaggtggatgtcatgagagagggtctctttctgcataaggctgggactgtgagatgtcatctttgctattcatggaagaaagcaccacttgtggatactaagagactgagctaaacagcccatccagccctggtttttctctattacatcatccaataaatctttctctttctgtctctctgcttaaggtagtttgagttgggctttagtcactagcagccgaaagagtcctgaccaatgcccctgcctgggagttattagaaggattaaataaaacagtgcattaaagtacctgccaaattgcaaatgctctaaacgtaattgctattctagctgaggttggttgctagagggctttagtcatgagcacagtattttgcttattccttattctcagtcctttaggtaaccttaagatttgatgagctcataaactgagaccacattattttggaccccacagaatttttttttccacttggccgcagtagtctctgtcatttgctgcctcggaggggcatcataagaaacagatatttgaaaacctttattgcatatgctgcagggaaagtgtctactgcttcacttggggttccacctataaagagacattaagaaatttttctcagacttacatggaaaggaaaacttgacatctcctaaggtgatacatctacaactttttcacccccatcatcagagaagactgagcttatattcttaggtattgaaggcatagccctcagcacagttcttaaacattcacatgatttttgcattattctccattatacattcatgtttatttttatggatgttgtaaatcctgtatcaaatcactatgatggcctgtaaggttggcatgaaatttatggcttcttttttaataaagatgaccaaagtgtataggctatgcctacatccttgtcttgatcttctaatggtgctacattttctctggtcctgaattttgcttatttatagctttatattttatagtatattttcttatgaattgccacgactacttcgtggaaataaatgagttatgaataaataaaagctcttgaataaacataaaaaaaacttgacgagcctgaaattataccatgtgagggcactgggtatttacttggtttcctactaaagccatctcaccccagtataagtcaaattgagtaacacattgaacaaaaaagggtgtttaaaattttgagagcgacagcacaaaaagacatatcatacattaataccaattttggaagacagatgttggaacggtgtttgaaagaacaggtgtatttgcttccttttcaccaaagggaatagggaaaatatttttgttaacagaaatgttcattatatcttcaacttcacacatggggacagaaattatgcaatagcaatatctttactataaacacccaatatcgaattagctagtttttcggatactcttagaagcatcaaagaatacaaaaatgcagaatgaggactccaaatcaaatgcctgctcacttacctacatcctttcctgggcagtattctccatgaagactggactttgtacaatctcctgttgtattcccagggcctcacaagggaggcacccaataagtacttgtagaataaatcatgaccacctccccttttcctgtgggaggaactttgctgcaacttgaaggccaagtcattgctggctacatttcttcttctatcatatcttcttcaccaactgaattctgtgcaattctttaaagtaggagttcttaagatgagatgggttcagaaatttcttgaatccactgaaaaggtatgccaaggtttgtgcattgggtacattttttgaaaagagcatgcatagctttcatcagtgttttcaaagtacctgtgatcctgaagagtttaaggaccagttaggcaagggattcattgtctagcatagtgctttgtgtatagtgggtgctcaatacatggatatacagtttaatggttgagatttttatgtttcccagtcagaaataactgggttagctctgtgatatggcctaataattgaatccctttaagccttaatttctttatgtgtgaaatgggaactataatatcttactattattattatttttaattttagtagctttaggggtacaagtggtttttggctacctggataaattgtattgtggggaagtctggaattttagtgtactcatcacccaagtagtgtacattgtacccagtagggagtttttcatccctcacccctctcccaccctcccgccttctgaatctcaagtgtccattataccactctgtatgcctttgcatacccatagcttagctctcacttgtgaaaacatgcgatatttggttttcaacttctgaattacttcacttagaataatggcctccagggaaatgataatatccaacagaatattgttagaattaaatgaggtgatgtaaagaatatttgacccatagtaagcactcaattaatggagctactgtctttgttagaggaaattaaatcatatttcagagaccaatatcacatactcaccaggactgattctcattatagcaacctttgtttttcaaaatgaaataaaaaaaaatatataaaaccgttaaaaaaggattttattttcacagagcagcatcatttaatgatttggcaatgtaatagaaatgaatacaagaggaaaacaaaggcagggatgtatctgtcatgtccagggtcagagatgaagtaaacctgaccaaacgggaattaggtctttgaaactctcccagtctcttccctcttccttcctgcctccacctccatcactgtgtgtatgtaccacatgtgcacacaaacacaaaaacacactcccagaaatgtcattatttaagagttaggcagaagatctttctgaataatttctttctttctttctttcttttttttctgagacagagtctcactctatcacccaggctggagtgcagtggcgtgatctctgctcactgcaacctccggctccccagttcgagcaattcttgtgcctcagcctctggagtagctgggattataggtacctgccaccatgcctggctaatattttgtagttttagtagagatagggtttcaccatcttgcccaggctcatcttgaactcctgacctcaggtgatccacctgcctcaggctcccaaagtgctgggattacaggcatgagcctgctaagcctggctccctctttaaaatatagttctgaattcaccctctctctaattcccctaatttaatttttgaatagagtgtcatcaaagggagtgtcaagtttgataccatttgttcttttttttttttttgaaatctttgaaagacttcttttttcctgattccattgtatccaagaataatctttaaagatttttggcttaaccaataaaaaaatcaatacctgtttgcgttgatgaagttaccaactgtggacctatgtgcttgtatcattgctctaattgtggtccgaatttttgttttctttgaaaaactgcttctataacacctgggagacaaaaatatttgtaaaatgaaaacataccctttagaattaagaaggaaagtgaactatggtgtattagaagcttctagattttctaattatgcacttattttattttaaataaatttaattttttatttcaaaagattttggggttcaggtggttttcgattacatgaataagttatttagtggtgatttcttggattcttgtgcacccatcaactgagcagtgtaaactgtacccaatatgtagtcttttatccttcacccccttctcccttcccactgagagtccccaaagtccattatatattcttatggctttgcatcctcatagcttagctcccacttataagtgagaacatatgatatttggttttccattcctgagttacttcactcagaataatggcctccagctccatccaagttgctgcaaaataattatgtgcttactttaaaagcaaagctgaggataagtttgtacaaaattagaactgaactgaagtagtgtgctacaaagggattacaggagtccatctattccaaacccctaatattccagaagagaatgttaaaatatagagagatatgagccttgtccaaggttatgcaactgttcccccttctccatccatggctggtgaaaaggctgggatgtgataggctaacggggttgaacatgtagtagctgttttgtaattattttcattaatagaaagtggcaggtttgtttttagcccactttttataccccaggtttccatctccctctcagggggtccatctgtggcaccacttctttcctgagggtctgcacacttgcctgcttgaaagaacattgccatgaagcactggttggtctagaacagtatttccaaaagtgtttgttctatgggctgtaaattggtattctctgggggaaaacagttgatgcttgaatgaattttgaaagtgctacattgaacaaatgtgtatgattatttcttgcaagacttctcagagcctttaatgtgctaataggcatcccaagtctctaggacaagggtaaagtacatatatcatattttcagagctgacttgattatggaatattcttgcatctctccccaaccccaacatctgggaataaatgggtattaagttatccttccagagatattttcattttaatataggctacttaagaagaagttattagttgagctgcttatttctcttagtgtgtaaggtctctaaagtcaggaaaaatatcattcatttctgaatcaacaatacttagaccagtaaggtgaacagttcttggcacacaggacaaatggcacaagatccacctatgtttgttaaaacatgaaaagatttcaagccccacaaggcttacttactggaactagaatttaaaccatcaatggcaatcaaattaaccttctgttaccctccattttttttttttttgagtcatcaatttcacagccctggggcaagaattactaagaaaaattgataaagaaaatcattaagaaaaatatagtattatcatatccctttttcttcttttctcactaaagaaaaattcaatgtttactagttttgttttaatgattttgaaagggagaatcatgacaaggatagaaaagctgagctggagaggcagaagtgggaaagttatatggaaaagggttgagatttagaaggttcttcctgagagagagagaagagttaaaacggaaggaagcagctgcctttgggtggaggataatgagggtagcatagatgggaagtaggattttaagatattttctgtgtaactcatacccacatctccacccacacactcggttttggaagtatcatgaaggacaaagtaaaatcttgcaatgctttcgtatgcattcttattcccctcttgaactttcctgcagacactgggccatgggaacctaataatatttgggttacactactaaaaggagagatatatgatggaaaaatagaaccctgtcaacttttcaacttctcgtgagaaagggaacatcatcaacttgtgaaacaactatatacaattctcatgatctagtcccactttgtatttccccagtgctacacaaaaatgtgattgcagttgtctttcttaaagcttgtttttagttaatttttcaatatttgcacaatgtctgtgaaaaataagggaaagctattttacagtgtacatacatctatatgccttataaatagaaactggagaaagtattaacaattctaatgatttcatcattaacagaaaaaaatctcctcaaccagcgccagctcttggcaaaaaagatcaataggaaactaaaatgcatttaaggatttctctagcacaagataaccagcactgcacttcacgtttgctaggtctcacaaaagagattttataagattctgaataatcttaggttgaaaaattattttggtggtctcaactgaacttctcacagacatcactgtctttgatcaaaatatagctacaatgtttaccccaggcatcatgagttacccaaatgctgagatgacaggaaggcttttctttgtattggcaaagtgatatataggagaatctgcctactccttgtttggggagaacatgttaactaaagctttcacgtacctcagaaaacacatctggtgtagtctttattactatgagttgatttgtttaatgaagtgtttgcagaggttgctaggctcagtaggcagaaggaatataagccagaaaaaacatggcaccaagtttaattcagttcacctaacatttgttgagcaactatgatgttgagcaactatgatgttgagcaattataatgtgccaagagatggggatacaaagacagataactgctctaccctaaaaagaaggaaggagaagggtaaatgggttggaagagagagagagagagagagaggaagagagagaaagagagagatgggagagaaaaagggagggcaaaggagatgagatagaggaagagaaaggcacgtgcagaaaggttttaagacaagcctacaaaagagagaggtaagttaaaggcagaggactaacaaaggaagaaaatcataagagaaagagacaggaagagaagaaatagttagaaatgatcccaaaaggttaagacaaagagaatattttgtttgggggctctggctttaccatcttctaaaaatgttaactgacaaaaaggtggctccattttccaagttcaaaatcttttaagtagaggaagtaggagaaaattgtgcttttagggttgcaaggtatatcaaaagatttggaagatttatacgtggagtcagtaagctaacctaaaaggttatcacaggttttacttttggaaacctttctcagaaaaccaaacaaacactagatttacagtaagcatgtaataaaaaaggcaatgggtgtctcctttcttttttatgcagtttataagtgctttttcctttctgggaaagaagtgtttctcctgtactggttgaggcaattcatcatattcagtagagtcagagtgtctataagtactcattatgatgtctccttgacaaaaggaaaggtgaaaatggtagtttagagcaggaaaatggtcaattttttatatttggtgtatcatattattcaggggattttttttttaagtttgagaaaaatggccctttaacaatacatggaggtgtgtggagggtattgcggatgtttgccgcactagaggctggctatgccaaatctgtctggaagcactggtttctaatccgagtctcttgggcagatgttatttgaaggtcagcctttctattgataaaatacagatagcttacatttggccaccatcttagagagatggagcaggaggtgctgggaaataccatcaatcatactattattagcacataagactctctggggtgagaggaaatcggtgggccaagatctgttgtcccatctcttcctagtgtgtttaccatgtctgaggggtgaagagaattgcatctatcgtccagctgtgctcgacactaaagagttcaccagtcattgcaattatgctggtgggatttggtgctgggggaattctgtgtgctgggagccatagggaggccatcaattcatttcacatatattatttctctaagaaacacagcataattgaggacaattttccaccatgaattgcatcattagctaacacagggaaagtgaaatgctgttaacttttctttttcttctgcaagctgatgagctgaagaaaatagaaaagtttaatgtaatttttttcaaggatatatgttgaaaatcagaatcaaaacgcttttacacggtaatagaaatcccacattttaatacattgccatgcacataaggagtcaagtaatgctgaatacaaaatagtcaaatatacaaaatgataaagcagattttccagcctgatagagatcatgctcacagatacaagggaggcaaacatctgtacagtttcatttttatccattttataagagtcatgcccccctcaactctttttgaggacaactggaaacagaaggaaacataagaatatacaaaggagacccaaagggaattggcaagttgatagctgctgaagatatggaaatcggtggttcaaaattgtggtacacaataattcttatgtttagagaaaaaaagtttctaaacatcttatgccctggaagccaggaaactaaagtggatatccaacagaaaaggcactcttgttttaccacataacttgattgcctcctcctaagtctagtcctgggagtttttctaggatgcacagaggaaaaaaaaaaaaaaaaaaaaaaagaaagaaaaacccaacagttgtgggaaatgaatacaggtaatacttatgtaattaaacactcttggaagaccaacagaattaagactgctggtttaactactcacttaaggaagttataaaaatgtcaaccatctacctaggcttctgtgttctgacatgtgctttttagccatgtttgttagtgtctgtgaaggaatgaatcatttttttaatcagattctcccccatcctcccttctcatactctgtaaagagcactgctcttatgttcaattcacattgtgtaatttttcttcctctttctttcctagaacaaacaccaatttgcagtagttcatcaaaaaagtttgatgtggctgtctgcttcctgtgcctctcagtttggcacctccacactctgacgggtcttctccaacctgggattggcagtcttcaccttggtagatcatggagctctaaatctttgggaggtgaagaagtggaaataaatggacacctgggctgtggactctgcagactagcctcatatattagaaaaagtgtgtgtgtgtgtgtgtgtgtgcgtgtgtgtaaaatgctgattgttacttcttcatcattctgtttcctttgtaaatcccagaatggaggctcagaaataacagctctacagagaaagcctcaagtaagggaaaggaatcattgaataaagcctgcagcccagatcggcactctaattacacataagggatattggaggcacagtatagcttcttcccttagctcattttagcctccaaacaaccccatctgctaaggagggacagagagcaccccatactgaagagcagtggcccagagagactgggctatttctattagtctagcattcttgaattcaaaacattttcttcctttttatcagagcagtgtcaatctccacaaagttctaagaataactcaagtatataaaccacaacagatcgatattttcttttctcaggtgctttttactgttaatattaaattttgttacaagattgatcttttctaaaattttgtgcaaagctatttaatttagtgcctgatattaaataattacattaactgaaactacaatagtatgatttaatgatacaagagtttcagtggaattagtttccaaatatttgtgctggcttgacttttcagcagactggttccttctgtcccaatcatgactgtgacacacagtacaaagtcaagagcctggtattattcagctctctgcaatgtgagcttcttttactagttaaaccatggtcttctcagacatggccttgtaaggacaacatctttctattggtggaagaaaggtggtggtggagaaaccattcagagccccagagagccctaaaattgcctacgagcatgagtttaagcaaatagaaccccttttacccccagtgagggccaacacccaccaaagaggcctccctttctggtgatctgaggtgggaattgaataaaactaaaaaagacaagggtttcagcattcaaacatgaatttcctaccccactctacattcatctttaaggtttccatctgcaaccgaaggcctttttgatgtgaaaaagaactgggtcaggcacttcgaaacctctgcagcagctggtatgtgggaaaacataaccttggtcctctctcaaatgcactgtatggtatctggacataagcattgtcaaaagtagacatagagccagcaggcagttcccaacattaacacgctaaatgcactaaattgtggttgaaaaaaaatactggagattatatatatatatatatatatatatatatatatatatatatatatatatatatatagagagagagagagagagagagagagagagagagagagagtgagaaaagtagaactgatttagggatcatagaatcaaggaccacaggcatgctcaaactcaaatcatatttttggaattatacttggataagaagtctctatagaggttagaaagataatttcatggcatttttgctattttagaggcaaggctaactcctctgagaagatgggagaagaccatgatcagtttgtggaataggacaggaccaaccctgaggtgcctggggcatttcagccagcaaatttttctatgaagttatcttcaagatcagttatcctaccctaagtgaaagcatgatctagtaagagtctcctgttttgcattttttttagcattacatatttgaatatatttttacagaatttgggcggtggcggtgattaaatgcaatcatattacagatctgtttgctctcatgcatccactcagtctggacttctacatttggtagatgtgtctgtgctaatgtggcaaaagccatatgaaaccaaccatttatttctcttgatccaaatgactgaatttaaaaaggttataaacaatgtggaaggcaaccagcagagtcttcagtgttttaattgtttgaggtattagtatctccagtgatggattaatttaatagcctccttccttgaggttcacatcagtagggctgttattaatactctgcacatgaggcaaaaaggcctgggcttaagagcctttctaaggcttctcaaaatatctgaggtttggaaaacaacaacgcaacaaataaccaaccaaccaaacaaacaaacaaacaaaaaacctcccaaaccattggctccaatttatgaaaattgaaaagaatttatgaaaattgaaaagaatatgaaattatgaaaataattttgtatgatcagaaataatgtctaaatatctatgacacttattatgtcaaccagccaatggtaattcaacacaagtcatatgtttacttttacattacattaagtatatgctgttggtgccttcttgtgcttgatataattgtaggaggaaagctctgaaggaagaatgcttggagtgcatcagggtttttaaatagccttacgtggcaaattgaacttcagttttatgatatctttggcatccattttctgctgttccatggaagtcatgtctcagtcattttgccgttaggcaggaagtataaaactagccctatgcctgatggcagttcccttttacatttgttgctggtaaatttcacctgaaaaaatttagattttagaaacagtgcttgctctcacccagaattttccctgtggagctaaggtgatggacagaaggccatcagtactgttactgtccttttagctactttccccaaatgagaagcatctattttgttctttatattaaggtgtggtagaactttcctgtgtacttggccaacttttccttaagtttcccgctttcaaaagaatgctctctgtcttcccaaaagccaccatagcaaaataatggaaacaaggctctcttttaccttgaagctatgcaatggtgccaggaatcatgtgcgttgataaaccagaattcataggataattttctggattcaggattagattcagatctaaaaagactaaggagcaggatctgcctttgaaatagagtccttagtggtgcctggagtagaaacatctcctggcctgtcctccttcctgatctcagggctgcactgggattaattaatcttccagatgactggtcagcgttattaatccctacctcactgctttttgggcaacaaattttcaccaagatcaagcttaagaagaaatattaggactggggaaaaaggtaacaaatacactttttgttgagttctttatagaattcttgaaaactacccacagcatcatgttaaaagaagagagatgaaagaaaaaaatccccgcaaaaaacaaaaaagtgcagtggagggggctgtgggaggggtgaatgaaaacagccttaaagcaataaaggaatttgtgtcattttcaaagattagatttttcaaaagagtctaagacgattgacaagtctagttgtcaagtaacaaaattattctaaagaatgtagaggaaaacatcacaaagaacaaaactgctcatgtactagaaagaggaggttttggtgaaagtaaagtgctaaggggggtattaaaaacttcaattccttgagacttttgttgttcctatgcaaaatcaattatgtgacatttgcagacaaagaaagcatttgcaagtaacaagggggatccattagaggtttttatccttagttgatattctcacgtacagctgatacgccttttctccttgaatgttaaaaatggcagaatttcctcaggactaaggaccgttagcctctttctgagcaactgcgaagtgactctggagagattcctggcttgtttgccaggattccggaggtagaagtgaaatctgcgggtgcacacctcacagagcctgagcaaggatttgaaggtacgccactacccgcaaagaaagttgataggatctctcttcccctaggtacgtctcaaactattgaagtaatttgcttttcacactagcaggactggcaatgctctgcatattcagttctggagtggaaataagcgaatccccttggcaccatggaaagtctcataattattcatttctgttcattcccaagagtgcctttcctgcacaagtctgggtgtcagccttttaataaaggtgtagcacaggtgtaggtaaaaggaaaagtcaagcatcaacagtttacagtccttagacataaaaatatgtatcctttacttccccacctcttgcttcctatcaaacaaaactcaccacaactatttctggatttctaggaggtaacattccgtacatgcatcttgggaagaaagtacagcacagttgaagttaaccatgggagatcacagaggaccaccacataataaagaagccaaagcctgtgaatgaagtcattcctcttttttgctggtttagctcttgactgcttggattttatgccaccatatttccaaactatcccccacaatgatttcaaacagaagttgacagtttggaaaagaatagtagttcatatgcaaatatggaatatgtgccaggcattaaggcatttttagagatacagtcttcaatggggctctttaatggtcttcattttgccttctcctaggtccctcttcacccatcatctttcaataatttcacagcgttcctttgacttaaaaaaacaaacaaactaggaaactctacttattgaattgttcagaatattttgcaaaggccaaagtaagtaacaatgaaccaccatcatttagtgaacatttgcactacaaagcatgtccagttttccaagagagtcagcagtagtctcacaatgtccttggctaaatcttaattcccagttacaatatctcagcacctggcagttcttaggcttcatcagactcaactgtgtgtcccctggatgagttatagaattggagtgttagataatccagcgtagtggtgaatggttgtgcctatataaagaaagggaatataggtagccagggtggatatcaaggaaaagcaactgaatgctgctttggggagctccaaccagctcagtctaggccctggaagagttggctgtatctgaaaggtgcaaatatgtggcctgatgcagtttaccatctgtcactctgctgcctcctccctgaggatccgtctgctgccatgttcttcttcctaggttactctggcagaatggagaatgctgtctgaattcagttttcattgtggaaatggtggggtggtgataatgttggggaggaggagatacagtttcataagggcaggtggggagtctgctttgtggactgttgttgcccaagcacaatgcttggcacatagtagatgctcaacaaatgcttgctgaataaaggaaggaatgaaaggaagaagaagacctgctattagaactgaaccacatgagatgggcagtggagactggaatattgtgtccaagggtgttggcagctggagtttggcctcctaattatagatgtgaagagaattacggtctgcagagggcctggcagtcctggtgctgacctgccgaagggccagatcttggtggtgactgcaacttctctgagttccttgttggaagcccccttctctggctctgcagcctgccaggcttgtggtgagtcatcctgctgctgactcatttggaccttcctccctttccgtcaggtttccaaatctcaggcgtgggtggtttccaatgggctgtgtatttcctgagaccctgagcggaggcagacaatgcttatgtatctggagacaccctaaaacaccaagcttgcttgcgttggaagtcttccagaactggttacccatattttaaagcaaagcctctgatgcccgtcagtcccaggctgggacagtgggcacacagaacatactttgctgagctttccattcaaccaacttgatattttcaggaaaaaacatgctacagtgttatgtagcaagtcaatatgaacatgtctctaatgctcaaagacaagcaataattaagttgactggtttcccaggactgtgctttgtcgtaagacatagttaaaaaaaaaaaaattagtcacaggtataatcccagaaaggattaacaagggactagtaggttctaccctaagtaaggaacctagtataggacttgacccttttccttctctaggcacatagtggggtcacttgatgtttctctcttgatgtttctctcttgagagaatggcgatttcaacttgacttagaattttttccgaagtgttaacgtcagaccacacaaaagaattgcattctgttgcccttaccatccatccaccatggtctttgattaaaagaataccatccccttttttcccttggaggaactcctcccttggaggagccaaatagaagcctcctgtatttgagtacctgtatgttcatgtggtcaatagtgcctgtgaacaaagaagcaagctaagatatcaccatcactggacccccttcttcttccctttggtgctagaagtaaaccagttgttcaataaagtatctggaggtgaagtctaacagtattgtggccatatttacatcaacctaccacaaacaactggggatatgcgagtagtggagtttgtcttggacagtctgagccggaaaaaaaaaaaccactaagatttataaaaataaaaagaaaatacttgatttctcacatgtgctgaatgtgctgattcatcttggtgtagtgttctcatataaagtgcttaagagttggacagtatacctttagacatcataactaacataatcgagacgtgtttacattcctaccagggcataatattgtgaacacttccactgagattgcagaattgctgtaattttttttttctaaaacatcatgccatctgcacacataataaaataatccagtagttgccatgctaaaacaggacttctagtgaagggcacagacagctccccaaagggaacttgagttatgcacagtgatgaaaactggaagcaattttccagctaatggtctgccaatgaccacttggaatgagttggcattatattatgcacctcattttaaatccacagcaaagcaagatttttccaaaacccataatattgactgaatgggtgcttttttcagttaatccagttaatctgtccacgatccaaggatatcttctggcagtgccatgggttagtctttctgtgaggaacaggccatgttcatatcaactggcaggacagcagcttggaaggctaaccgtgtttatggagaaccctcagatgatgctgcaagaagaaaaagggggaaatatggtaagttctttcctttatgtttccaggcactgatatgtagcaattatcttattcaaacaaaccctaacacccttaggccaaagagaaagctctagtcagaataatggttactcaatgccaggatggatttacagtggcttatattcatgaaatttttttttctaccatttggcaaggcatggaagacacccaactgagaaataggtgaagctgcctggaagggagggcaaaaccagatctctggaattggcatccagccctatggcggggctgcagtttgggaaaccatttcatgtattatgaaggttcatgcatttgcttggtctggtgcaaggtaagattggggatggtgtgaagcattttattgtgggagagagatgggggtttcatttatcagaaagatttcttgggatgcaatctagaaaaaaaatattggaagcggaatggctggagctcttgagtttgctagttgcgaagtcagattagctgggaaggttagagactagatagagaaagtcattaaaatcggaccagagattaaactaattgaattgcaaccctgcttttgggcttgggagtgctagtataaaaatattaatgtattttcctgagtgttctaatttaaattgtctaaagttcccgttattttatttgggtactccctacagttccttatacatgggtcttcaagaattattatatgagtacaatggaatgttttgctcagaaaaatatcagtattagtttctaatacacaaaactatcagacaatgggagagaagcacagcaggtattcttgatgcaaaagaaaaaaaaatctacctcagttttcaaacctggctctcaaatctaactaactggcttttcaaaacatgacagaacgcactatttgtaagcaagtgtttgattaacatttgctatttttgagaaaatgaaaaaataaaaggtactatgtaagtgtattaaatatcaaataataatacttctgataggttgtattgaaagcagaatactattattgttgatggcattgtcaactggaaaaataatgtcaatttattcaaaaattattgaaaatgcatatgcctaaatgtagtaattccattcctaggagtatatcctaaggaaataatctaaaaaaaagaaagaagctatatgcacaaataggtaaactagaggttatttatcatagaggaaaaattggaagcaaccactctcttattgttgaagatttaggttaagtaaattatggtacattaacaagatggataattacatggccattaaaataatactaattatgatgattatgattatgtagcaacatggaaacagttatgatatactacaatataaagcttatatatatgcatagaaaagaactgtatgtgaaaatgaaggccctagaatttttattactgtcatcatagtattttgcaaaacaacaacaaaaattaggctcacagggttgcaggattgccccatgactaactaaagcatcatgattgttttcactcactaatactaccttgaaaataaatactttgtaatttcattaagagaaacacttcagtattttgaaaggggtataaacaccaatgtgcgtaagatcctatccaggttgacctgctaggagggcagtacagcctgaaagaacaacattgatttctaggaacttgacacagtgtaccatccttgagacctggctaaaatcagatccagaaaatgtgtgaccttggaaaataatgaataacctataaaatacaattttaaaaaagaataatgataataaagagtaagccctaattaattattatactttggaacctgagtcatgagttgataactaggtttatcatagttactgcttctttaaataaccatgtttcctacaatggtctctagtagctgagagaaagcagatatgtctaatcttaggatattaaaaaagcacttataaccatggatgtaagtggagtgcagtatactttagagcactttcccttatcattgcccaatcctcttctcaggacatgtagaattattcccattttatagattaggaaattgaagcccagaagtattattaacccaagatcacacagctagtaaggatcaaagctatatccaaatgatatggtttggctgtgtccccacccaaatcttatcttgaactgcagctcccataattcccacgcattgtggggagaacccggtgggagataattgaaccatgggggcagtttcccccatattgttctcgtagtaatgaataagtctcatgagatctgatggttttataacaagtttccccttttccttggctcccattctctcttgcctgctcccatgtaagatgtgactttcaccttctgctatgattgtgaggcctccccagccacgtggaactgtgagtcaattaaacctcttttcctttataatttacccagtctggtatgtctttaacagcagaacgacaacaaacaaatacaccagacttaggtgtgtccccctctagtgacatacaggagtgatagggaggaacatagaaatattctgagcctttcccatcccatcttctgagtaggcttccgtgtttatccacaagcccaatcagcacgatgaagggccctattagagtaccaaaaaaaaaaaaaaaaaaaatcagaggctaaaatgaatttatattagagcaacaagatactcctgcaagacatgaatataaatagaactagaagccacagagagacaagttgaaggtttagagggtgacataggaggtttgggacagtggtggccataatgagtggggcattgggaaaagtgatggccaaagaaaagagtgtgctatggcagaggagtgtcatctttgaaatctttccatggtagtcagtgatgcttcactgctctttgctgtttttgcagttagtattgtgttccttttgaatgggtcaccatgctgagatgggctttatgggaggacaagaggtccccatttactcaggctgtatgtgtaagacacgtggtgaaagtaggccttgaaccttagtctttcttcttcctattattattttttggagacagggtctagctctcatcgatcaggctggggtgcagtggcaccatcacggctcattgtagcctcgacctcccaggctcaagtgatcccctcacttctcagccttgctgggaccacaggcgtggcgtgcaccactacacccagctacacacacctggacccttgaaccttaatctttctatcaatcacatctgtatagtgatgggttctgccatcatcactttgctagagacttatctgcaacaggaatcatgtcttcgggtatataaatctacatgaggtcaaaatgcaaaatggcagtttgcattagacagccctggctctgaaaagggggaaatatgtggtctttgatatacaacgctctttgggctccatcccctgtgcttcagccatcccagcctccttctggctctgcatatgtgtggggttgttccaggtcttgctgatcctttctttttcccagggtgtcttctttatataccctctagcattagtgaacaccaaccccgccctctttcacaaccacctagagcgtcacttcctttatgaagtattctttccttctagacacagctaacaactctctcctgtgtgcgagtgtggcatctcaaatttttaccaaaaaacccacaatgaacacttcaatttaatgtatccatcgttcctcctaatttttttgtgggtgatgccatgtcttattgttgtgtattctcctaatgcaatgtgcagtgtcaggtatacagaaagtgcttattaaatagttgtaaagttaataaagaaaggaatgatgttggaggagaatctttgtttctctgtttaattcagtaactaatgttgcatgagattcaatcctggtctgcatgtggagagtgggattgctctggtttctttctctgctttatcaactacttactcaaggaagatgtacatcctgggggctgtccatgtatggattttgcagctaacaaatagtaaaaggctctttttcaaacctctgtttgatgggccatcattactattaatagtttagacattcttggaattattggaatcaagaattcttggaatcaatcatcatatttagccctatggcttcagagtctgggatgaggagggaagcactggagtctagtggtcaggagcatgggctctggcagatatgggttcacatcctaggctcactacttcctagctatgtgatgttgaacacatgaatttttcccaagctcattttcttcacctttaaaatagcagtcataattcctgcctcaccaggctgctgtgttgttaaaaaggactcataggaaaagcattttgcgtggtgtttagtaaataactaagtgatagctactattgttttattattattatcatgaattcctaaaattccttggagaaatcaaagtcaaagctctaacgctaagtatcagtgttttaatgctaaatgtcaatgttctaatgctatagctgggggccaggaaaagaaacaaaatacccagaggtcaagcctttgcaactcccaggaggcagataactgtcttcctgcttgccaaggccactttgggcacactctggctcctgctctctcccagattagcgcagcccttaacagacagttccatgagaaagggagtctgaaacacttcaaaggcaggaagtgactggcccaggaggcagtggccagcttggcaaaaggttcaataacagatctgggatggattatgtcccgccccacctttcctaactccagcacacagggctgaaggattgttgtgtgtggagaagaagaaaagatattatatccaggcagccccacgtctcatgggctcaagggggaaataagacttcatcctttaaaagggctgttcagtgtcttcccttcagaaagaagggtccatatcttctacctgaaagtgtctttcgtgtaatgagttcaaggcctttgggggtgtatctgaactgcaacttcaatgtgggacaatttatatctggtgtgaaatgcacattccaaaaaagtgagatccatggttgccccagcagaatagccaataagcagagctcacatttatggaacgattacaatatgcctacaaaggttttataggcagttactcattgaatctgtactgccatttttgaggtttggattcattattcctgtaattcacacagagaaaatgacagcagggtcgttagctggcacagccacagtgctagaatgcatagagctgggactagaacccagatctgttctcaccacggtgctttcctgactcaataagaaacatttgttgggaaaagaaattctccaacaagaatggaggagagaaatcaagtaactgtgtttgcataaaagaattctcatcaaacatgaatcctatacatggagtgccataaataagaggtttgacctagagaaaggcagcacatttttattttaacagtctaagatctttcctatgtttagagcactggttctcaactggatataattttgccccctacagcacaaatggcaatgtctggagacactggtggtaacaacttgtgtgtgtgtgtgtgtgtgtgtcgagggagaggcaggtactactggcatctaatgggtagaaacccattaaactgctgaacattttagaatgtataggacagccctcacaacagaaaattatctggctcaaaatgtcagtggtactgaggttggtttggaagatacaggtccttgtttctattttcttttctttttttaattctatttttttattattattatactttaagttctagggtacatgtgcaggcttgttacatatgtatacatgtgatatgttggtgtgctgcacctattaactcttcatttacattaggtatatctcctaatgctatccctctcccctccccccaccccacgacaggccccggtgtgtgatgttccccttcctgtgtccaagtgttctcattgttcaattcccacctatgagtgagaacatgcggtgtttggttttttgtccttgcgatagtttgctgagaataatagtttccagcttcatccatgtcccttcaaaggacatgaactcatccttttttttttgtttgtttctattttctactcctggttgtgagccaaatatatcactcccaaaataggccaagataaaaaccaacataagtgtgcctcgtgtatgtacaggaaataaggctaatttcaaacctcactcccctcttcttctcatcatttgctcattttatgtgattttatattcaatgcaatcaaaacctctaatattaaatcatttctaacttttagaaccctcacaggcattaccattataagaatcaagattggatgatttagagaggtatgcttaattaattaattaattaatatgtatgggagaggtaaaagataaaagaaggacaaaggatttatgtggccataaagctaaactttgcttctagtctatgatgggagaaatcatatgtattctcagcagcgctggtcccatgtctgccactctctgccccacaagaatttgacgaagagaagcgggatcgggagggggagttgcccactgagagtatgattaaggaatcaaccctctgaccgcatgaagatgaaggtcagaatctccaaagaggccggacatggtggctcatgcctgtaatcccagcactttgggaggccgagccgggcagatcacgaggtcagaagatcgacaccatcctggctaacatggtgaaaccccatctccactaaaaatacaaaaaattagccaggcgtggcggccggcacctgtggtcccagctatgcaggaggctgaggcagaagaatggtgtgaacctgggaggcggggcttgcaatgagccgagattgcgtcactgcactccagcctaggcgacagagcgagactctgtctcaaaaaaagaaaaaaagaaaaaaatataataaaagaatctccaacgagattggtatcaggatgacagagaacttgggttaagtgtaataaaacagagatgcatacatactaactggtaacttcccattatcgttagtaaactggaaagcacaataagtctgtgatggttaattttatgtgtgaacttgattgggccactgggtgtccagatatttggttaaacattattctgggtttgtctataaaggtatttgtagataagatgaacaactgaattggtagactttgtaaagcagatagccctccctaatacaagtggaccccattcaatccatcgaaggcctaaagagaataggctgggtaagggataattcactctttctgcctgactgccatctcctgcctttggactcaaattcagactggaaccataccgttggctctcctggatctccagtttgcaaatcttgggacttctctaccttcacaattgaataagccaattccttataatacatctctctatacatatttatgcatcttattagttctgtttttatgaagaaccttgaggagcagagtctacagataacacaatgaccataagagttagcactatcattcaccaagtacttcctaggtgcttagcatcaggctaagaacctgtgttcactttgcagcaaccaaagtaggtaggtaccatgacctttactccacaaatgcagaaagccagacttggaggggtgagtgatggaagacaggctgtggcctttaggctaggctatgatctttgatctgactatgaaatatcaggggcctgttaattccagaaatgttaagcgagaaatacaaggtctcaaggccccatggcaacatttttagacgaatacctagatgggataggaaggccttggcctccacccccaccctctcaccccttggtgttattgtttctattaaaatgtaactggctcctgatactgtcagaggagtagttctgctgcctggctttgcagtcctcgttgcttggatggtcacctttctctggggagttttgaagggttctcgtgacaagtgaaggtcccaaccaacacacacattgagaacgtgagagaaaaagaatgcccttgtgtgcaaactgtctctctccttttcctcagcccttggggaaaaaaaaggacattgtatttgctcacttactgttctaaaagtaaggccactagtctactacactgtgagcctgaaaaacctctcagaaactgactctgattcctggaggttaaattgaatctctagattccgaggtttaagaaccctgacattttgatgagagattctcaaacttgactgcctcaaactcatctgagggagcttcttaacatttttcttttgtccagcttgtctccatttccaatgattcagaatgtccaggggaggactagaaaactctgtttaatcatagccttgagaattcacacaaaagcagcttggcaaaatccatgaacacacctacatctttcccccagtacttaaatagtagttatttgtccttcagacagagaaaagtggtatatacggcaggaaaatttgctttatagccttgttcttttcacataataaaatgccacaaatcctggatataatacagtgcagtgatccaaatatttagagtgaggcagacaggagaagctattcaacccagtcaaagtcctgggaatacaggcatggtccatcattccaggattgtttacaggtttctcatacatcaatcaaacaacatgtattgtattaaacactaaagtatcctgcattgccttgggggcttcaggggttgaagagtctccaatctgtataattacacatattgttacatagaatctgtatcacaatctattagaatcactgatgcgctgtctctagatgagtgtttctcaaactttactctgcttagaaatgccccagagagcttggtaaaatgctgttttctgggcaccaaatggaaataatctgattcagtagatctgggatagccctgtgactttgaattcataataatgttgcagggacactgatattgctagtctgaggacctctctgtaagcactactgctgtgaaccttaagttccttcaggcaagaagtatgtctcattcttctctttctgttgtgtgtggtagaatgtcgggactatcaaaggtgctcctgaaatgtttgtcaaatgagtgagtgaatcaatgaatgtatgtatgaagaaagccacatgaatgaaatcagcagttttcaagtatgggcagaatttcctgggaggccaggatattgttctctaatgagaattggtttagaaatttcagtatatgcaagtatctgaaactctatatattctgtgtgatcatttaggatatctattaactccagtctctggggaatgtttccctagaaagatggcaaagcctcacccagctttacagctctcttgagctagaagcctggtgacaacagtggactatcatcttgtaccacatgaatacaggatgatgcatttctgggagaagcatcatcaggccagatgctctcagcagggatgcatttgtacagccaattagtcactggtaacctcagtgattccattttttttttgcactggacagaggcaagtatctcaagccattacattctgacagccagctaaaagcccattgaaccttccagaggacaactctgtccactggcacaaaacagcataaaaatgtaccttgaagtataatctaagataccattgaaatttccctccgtctccacaatgttagactgggtggcagattatactccgagggactgttttctaatttctctcattgcttctacaccccatctctcttagtcacagagcacagagccttgtgtgtttgtcaactgtatgaataagtgaagttcctttcttcttcttcttctttttttaaattatcttttctcctctttgccttttgctttaaacttattttaatttcaagggcttctctgttgactgatccaacagattctgcattggaacaatgttctctaagattcactactttagataaaatatttttaaaaatctccagatcctgcagcttttccaagagaaaaagaaaagcacacttttaaaggagaatacaaggtctacgtaaatactcctttttttttttgtcacctctcaaggagatagaaatatctcttttggaaacaaagctatgcaagataaaaatgtattaatgacacttcgggaggctgaggcgggtggatcacctgaggtcgggagttcgagaccagtctgatcaacatggagaaaccccgtctctactaaaaacacaaaattagctgggtgtggtagtgcatgcctgtaatcccagctactcgggaggctgaggcaggagactcacttgaactcaggaggcagaggttgtggtgagccgagattgtgccattgcactccagcctgggcaacaagagcgaaactctgtctcaaaaataaaataaaataaaataaaaataaaaaagtattaatgaataatccttacaacagtgatgacattttgtcatacggaatcttagagtagaaggtatctttaaacagtgcttctcaaattttaagatgtgtgtatgcatcacctgggtatcttgttaaaatgcagatcacatagttctacaagttgtcaggtgataccagtgctgctggtgtgtggaccatactttgagtaggaaggaggaggagtaagtgctactggcactggctactcctgaaagaaggcctcacatattctctcaaagcctatgtgaactgaactatgtgcaatgatggaaatgttctagatctggtctaacatggcagccattagccacatgtggctactgagcacttgaaatgtagctggtgcatggaggaaattacttttaaattttatttaattccaattcatttatctttatatggttatgtatgcctggtggctaccatatttgacagcgccactctgtagtggagaaaagagagacagcaatttaataaaaaaataaagtttagagagaagaaacctaaacagcaaggtgaagcttcaaatcctttcacccatattgtaagtgtactcttgttctcactctccttcctgctgtatgtagggagggctcaaggcttctcctctgttctccatcatgttcccagaatcactctatatacaaaatagtaattagaaaaggcttcataaacattctgaagtgcggatgattatcttgtttacataaacctctttgaattggcaaaatcaagcaagaaatcttatgagaaatagttcctttgttatgagctctttccccttgggtcataccagggcaggattctgaagacagtctccaaggttattatattgtgggttcttgccctttggtctggaacacagagggaaatgcaaacatttctggaatgtccagacattccagaaaagtttaaaagaaaaaagagctcaagtcgagttccccaaaatgagaaactgctgagggtggtgaaagggtagggcttggttttgtctgaactacagccttcagctctcagcaggttacaatctatattgcagttaacgaggtttggagatcttccctgggctggtgggtactaatttccattgaggaaagagttatgagatgtcttaatgataacagataatttctctgtgtgggcagagcctcaaagcacgttgctataaaactgtgtggactgggctatttcttttgtgtacgcactttccccttaaagaatccacttggcatgagtctcaaacctgcttggggacccttgtgattaattgcttgaactggctggtggccatcagcaggatcttgcaatttaccaggttctacacagaattatgaagctgaaggtttaatgagattttaggtaatagagcccagatgtccaagactacgatgtttgaaattacactgcttgcaaagctgtggggcttaaaccttatttatttcttgcttagttgatttccttattcccatctttatgtaatcttggaccagtcaaataaggcctttaccttgacatactgtatctagagaagctattcacaaacacacacctgtggccaataccctggagagcccagagagccaagacccccctacctttcagcccaacctcctgggatcacctctcagccaaggatatggtaattaccaaacctcttagccaaggatatggtaattaacagtcctaccaccaccttgctgctatgcagcacttaacttccagattgctttcacacatttaattgcattttattctgtcagggtccaggagaaatgggctgggatggtattatctctatttggatgaggaaaccaaggtacacagaagacaagggataataatagctaacatttgtgaaaccctcatgtgccaagaagtactgttccctggggtttacgtgcattattacttttaagcctcgtaacagctttgaagttgatatgattatcagttccgctttgaaatgggagaactagagcacaaagaggttgggtcacaccactaagaactgatgaagccaggatgaaacctgctctggctcttagttatatgcacttccacctccctaaggaagtgtagtctgcatcacagccaagacctggaatctgttattgttaaagcagtattctttgtacatcatttgcgaggaggaagacaaatcccagatacatttactaatgagaagctacctataccatttttccctgctgtcctccagagcagtgcagcttggagagggattctatttattgttgtctcatttgaaaagaaaaaaacaagaaaacaacttgacctaatattccaggccattcatgatggcaacctcaacttctccttccatccttatccacaatgcattccagacacagaaatggattaaatttgtcttacacggccctacccttgtttacatggtctctacttctttcttcatccttctgcccaaattctaccctttctgtaagagcaagtgctactggcactggctacttctgaaagaaggcctcacatattctctcaaagcctatctctccctgctctgaacctccacatgattttgttgaatgaatggatgaacaaatggaataaccatcatctcttgattgctgtcctaggcactgtgctaaacatcagggatataaaaatgaacaacaaataacccctgcccttgccttcagaaagctcccagtctaatgagagattcgcacacagaaaaaccactactgcacgatgtcctgcatgctattatagaagggcaagattccaggggagcagaagggagggggaggagctctccttgctgtttacagatatggctgggaattctgcccaagccttatccccccatctagttacggaaacttcacgtgggaagggattgtgtttaagcatctttgcacaactcccaaatcatcagcatagtctcctaaactaaacaaacgtaagataaataatgaaggactgtattagaagcgatggagtctcactcattatggtaggggcagtctacaagcctctcctctcctctttgcagtggaaataaagaagaggaaagcaggcccttgctgctgtccacagtggccctccaatggagctggcccagacagagagagagggaggaagctcctggcatttccttagggtgagtgagtagcaatgacctaaacgacagctttcttttgcaagggccaaggaatgtttaatgtcctgctttaaaataacagtttgggcaagtcttccttaaacctacttctgttctgaagagttggaaaatatttcttattttaaattattcccatttcagagaagtaattctgaatctataaaattatgaggcccttataaaactctacaagtaagcttttttttttcttaattttctattcttctgaacaggattgcgagggagtcctgggcagtggcccagccccatgaaaagctttccctccagacggttagtgtttggtttcgggggactacaacagcacttcattcatatttttgaagtttgctggagacaggaggtggaatggctgtcactacacaatattcatatctttccagaaccaccaacctgtgttgccctaccattttaaggaaccagtgtgggataaggaagataacaaattcttccatttggcagctttgagactggtcaagttgtttaagttctatgagccatctgaaccacagcttcctcatgtgtaaaaggagaagatttgtgtgtgtgttgcagattttgtgtgtgtgtgtgtgtgtgtttgtgtgaactactatatttcattaaatccaagatacatttttttcaaaaagctttagagatgggggtctcactatgtggcccagaatggagtgtagtggccctttgtaggcaagatcatagtgcactgtagtcccaaactcctgggctcaagtgatcttcctgcctcagcctcccaagtggctgggactacaggtgtgtgccaccatgtctgacccaaagtacatttaaaaaaaatgtaccactgagaaagaaaaaaaagatgctgattaaactatgatataatgctttttatagtcccgcatcaggcataattattagccttttgtggcttaaagatttctttaatctgctctaaagaacttgacaatttctatgccttctggtataaacttcatgtgtgataagtaaacattttggatgtatctccataataaaacgaaacacaccttcatctacttgtaataactttctatttgaggtagtgcaaagctcagtttgctgctttgcaaaaatatatgaagttgtaattatacctccaatgtcaaacatttgcctcactaatggcactgtttctttgacttttggcatacaagacacatttttccttcaatgccaaattatagtataatatttctgaagatgtttttcaacagtgattaaactcaacaggtgaatttgagtgaagtaatgaagatatgcacaatcacaggccacttcagacgtgcatcactgccatgtgacctacagtgattacaagacttcctagattgtaaaaggtacaattcagaaatgttaaaatatgagacaagttggatctcagatgcaatgaaatacggtaaatgaaagagcatatatcatggatcttgtatcctgtagatacctaacaaacctcaaatccctgcctttttaataaagaatgagaatacgatgaagcataaaagggtggagggaggctggacctcatcttttggcaaagagataaaatactgaatttaaatctgaatcttgtagggtaaaatttatattacaggaaataaaaaccatgaatgatctccatatcctatgtcagatggctgcaaatattttgtcatagcctttctccctacctctcattgagagatggggtcttttttctccctcctgcttccttgaatctgggacaggcctgagacttcttggaccaacagcatatgacagaaatttctttgtgtctgttctgggcttaatctttaggaggactggaaacttctgtttcttcctcctttgaacctagtcgccatgctgtgaataagccatgacgcaacatggacaggcccacatggagggcaactgaggttattccaaatatcagcagccaccgcagctgaacaagcagccaactgcctgtgctaacatgctagccatttcagtgaaacatcttggatgtggatcctcagtccccaatgatagtatgtatggaaaaaataagaggtccctgctaagccttgcccaaattgcaaaatcatgagcaaataataattgttgttttgagcctctccagtatggggtggcttgccatgcagcagatcatcaaaattcactaccctgttaattttcacagatgctctgagcaagacttgttctagaatcccaaagagcagaacctggaagacagcctagatctgctgactcctgaactgaaactcttgcatgattattctacacactgaagttattaagggctaagcaaggcttatggagctcctaaagtcttattccttagccctcataggactatatcatgagatgaagtctaggtcaattctggtcggttcaggaaagctacagaattaaaaaaacattcaagagaaaaaaagtttcagcacagcacacccacctattgaccacaccccaacttcccataaacacacaaggtcttgtaccctacttggaaattgagagtagagttcatgagtttgatgcaaatatacttgtgatactgtcaagcttttttagattatctgttggtggtcccaagaaataatatcatagtggaaacaagcatgaatcactgtggattgattgatctcagtcataggttattcagaatggcatccgaagaagaaacagaatatcgtgtcgatagaataaaatacagggactagaatcagtccttttcttctgacaggaaggttccatatggaggcagaaatctggttaactacaatgtcactttagacagacaccaagtgtatttcacactgttgttcaccttctatgtcaggatgtcaagaccttttgtttcaacatgcagcagcctgcatgcccaggttatggtttctgcagcatgttagctgatggtcatagtgtgtgcccttggtagtgtcatctacaccaaaagaggcaacactgtcaagcttttcatcttgtagtgtgatgttcagctaaagaggcttaaggaaatatatctatatcttctttgtctcaagaaaattccaaatatcactgaagcaggaagcattttcacaggcatgtatgcaagatgctatttactgtgggtatagatgttagaaacttagtgtttaatttaatttggaaatcagaaggtaggggaaagtcatttaagttaacttagtgttgaattcaatacaaataactgttgtttatctttgctttaaagctataatactcatgaaattgtaattctttcccaggacttgctggctgatgacaaagctcttgtttcctacagaaatcagtggcttaggagagggtgccttagagcgcatggatgtaataaactagaaaggagaataaagtgcagtggcacaatggctggaggtgaaggcagaggttagataggaccaatcctcagaccgaaggttaaacaagggggctaagctgctactgcagttgttacacgttaggagaatttacttgcagcactatttaaaaatctgaataagaatatttaagctagaggaatatagacatgaaaaaatatattattttctttataaatcaagttaaggacaaatccctctatttgaaatgttaggctctggcaattttaataatctaaaacaagtattggcaaactatagcccctgtaggacaaatccagcccactcctgtttctgaaaataaagttttattggatcacagccacacccatttgtttacgtattgtcttatagctgctttcaaaacaacagaagagctgcatagttatagagatcatataactcacaaactccaaaatatttaccatctggttatttacaaaaaagtttgccaacccctataaaataaatgtaatatcaaaaataaatctaaatgttagtgaaaaagctttgagaattttattatacattgcaagaaaaatagttgtcattgagtgctttttttttttattacactttaagttttagggtacatgtgcacattgtgcaggttagttacatatgtatacatgtgccatggtggtgcgctggacccactaactcgtcatctagcattatgtatatctcccaatgctatccctcccctctccccccaccccaccacagtccccagagtgtgatattccccttcctgtgtccacgtgatctcattgttcaattcccacctatgagtgagaatatgcagtgtttggttttttgttcttgtgatagtttactgagaatgatgatttccaatttcatccatgtccctacaaaggacatgaactcattactttttatggctgcatagtattccatggtgtatatgtgccacattttcttaatccagtctatcattgttggacatttggcttggttccaagtctttgctattgtgaataatgccgcaataaacatatgtgtgcatgtgtctttatagcagcatgatttatagtcctttgggtatatacccagtaatgggatggctgggtcaaatggtatttctagttctagatccctgaggaatcaccacactgacttccacaatggttgaactagtttacagtcccaccagcagtgtaaaagtgttcctatttctccacatcctctccagcacctgttgtttcctgactttttaatgattgccattctaactggtgtgagatggtatctcattgtggttttgatttgcatttctctgatggccagtgatgatgagcattttttcatgtgttttttggctgtataaatgtcttcttttgagaagtgtctgttcatgtccttcgcccactttttgatggggttgtttttttcttgtaaatttgtttgagttcattgtagattctggatattagccctttgtcagatgagtaggttgcgaaaattttctcccattttgtaggttgcctgttcactctgatggtagtttcttttgctgtgcagaagctctttagtttaattagatcccatttgtcaattttgtcttttcttgccattgcttttggtgcagtcattgagtgctttctactccagagatctatattttaatctttactcagaacaagttctgtgaagtaagtagcagcatagaagtagccaagacctacagataatatcaattactagtagttggtagagaagtgaagaaacagaaaaaatacaacattacagcagtccagggctatttagggtagggatatgagtatcatagcataataaataactgatgtgcataatgatagattttggaaatctaggtgcttaaaacagtaagtttcagcaatctggaaaactcttaagtaataaagcttattctcaacatttcttgacaatgaaaatattagctgcgtatgaatgtggtgtgagatttcaggaaactgctaatgtgactttgtgtgcataacatgtttctgaaaatattcattccctatatccaccctctatatcagtttttcctctccgcattcatcgtttaggcccttgtggtgtcttcatctggtctctacctttttttttgagacggagtctcgctctgtcaccaggctggagtgcagtggtgcgatctcggctcactgcaacttctgcctcctgggttcaagcgattcttctgcctcagcctcccaagtagctgggactacagatgcacaccaccacacccagctaatttttgtatttttagtagagacagggtttcactatgttggccaggatggtcttgatctcttgaccttgtgatctgcccgcctcggcctcccaaagtgctgggattacaggcgtgagccactgcgcccgggcctggtctctaactttctactttctgctcccatctattcaaaacacttttaccagatcagtatccctacaaaacctgtcttgctcatcagcacataccaaatgaatatcagtatgggtgagggattgtgctagattctgaggaagattcagaactgggtaagggagtttttgtccataaagtgcttgaaatatttggaagaaaagacaatatctttacagaaaaataattaacagtataaggtatttgttgattcagaaaaagaaaaaaggttaactagattttataaagggagtgattgctattgcatggactagtcctggagagggtggaatttgaatcaggccttgaaagagaggagaaaaaaaggagaaagggtattttagaaagttagtgatgcccatctgtattcaaaaacctcctgtggctccacatttcttaaaggataaattcaattgtacaaggctatgtccaaggctctccataatctttatccaaccatctgcaccctccataatgcccttcacaaatcagctctcccgatttttcttagtgccttattgactctgatttctggatgtgctgttcctaatacttagaaaagctttctgtcctctgtgctaatcccaatcctgcctgttatttgaggtccaaattctccatggtgcctcaccatgggcctctctattccagtgcttggtcacatgtggtcctactgcacctgactagcatgcagctcacaccaagtatagctcacagcccaagttctgcaacacccaagttggtctgtactcaagaagacaagtatactgattacagccttggatattaaattgctatgagggcttaaactcttattatcaagttatttatctatcccgttgtggatcagtaataaacaattcacagcatggtactggtactcagatcacactttactattattttccatttttatttttaattgacaaataattgtatatatttatgggaatgcaatgtaatattttgatatatatataattgtgagatgagtaaatcaagctaattaacatatccatcaccttacacatttgctttttgtgctgagaacatttaaaatctattcttttatacattttggatatgcaaccatctattattaactataatcaccatgctgtgcaacagatttcaaaaacttattcctcctaactttatatcctttgaccaacatctccccacccccacccctgccatccccagcccctagcaaccaccattctactctctgctatgagttcaacatttttagattccacttataagcaagaacgtgtggtatttgtctttcgatgctgggcttatttcacttagcataacatactccaggttcatctatgttattgcaaatgacagtgtctccttttttatggctcaatagtatcccattgtgtatatataccacatttttttaaaatcaatttttccattggtagacacttagcttgattccatatcttgtcagcccacactttgaatagtgttcatctagttgaccttcatctcctctttccatgaatcctaaagcacttaccgtctattttaggggctgaaaactagtggtcagtaggccaaatttgaataattaccaacatttaataattgggagatttatagttctctgaaaaattggcagttgtaacatcattgtctcacactctctaaagcaacaataggctggagctgagcaaagctgcccctttagatgtggcatgaactgtctgggtctccgctgcccccaacatcctttctactgttcacaggccagctcacctcacctcactctttttttacgtttgcctgaaccttgtaggcatctgtgttgcccatacacgtctatgacgtgcattttgccattttagctattttattatatactcgaattgcttgctgtgtggtttgccttctgttcacatctagacgcaaattcctagaggagagagactatgccctgtgtgttttcctggtttatctcagtagacagcacagagctatatcaacaattatcaaatgcttgataaataccttttaaataacagaatgaacaaatgacctattccatctaggttataaatctaaagtacaaatcctaaattgaacatatgaggtaattttacgaacacccttgggtggattaaaggtagctacaaattctttcatatcacctcccagtgagagatgggggtctattatccctccctttgagtggaggttggcctctgactgctttgaccaggagaatgatggaatgatgctatgccagttctgggcctggcctgtcagagaattgtcagcttgcatttgatctgttgagaagctctactacccttctggagagaccacatggagacatcctgacaatatatggagatagggagaggccagctgagccaggtcttgcagccatccctgccaaggcaccaggaaggtgagtaaagttgtcttggaccagtcctgacaccagcttaatatcacataggagccacaggcaatgccatgtgaagctggagagttgctcagctgagctctgccccaacgtgcaactctcaacattgtgagatataataaaacagttgttatgttaagccactaagtttttgaggtagttcattacacagtaatggatgaaacagaatttatccctgagtttccactgtttacctgaatgatatccttattatgaacattcaagtacgtattactcttgttaaagctatggcttacactgaaaatggtaatgcttgcctggagttctggataaatggttgaggctgttcttgaatggtgggaccaacctgggagttctgtgtctaggactgagagaatcagtatctctcggcacacaacagtgtgagtgaaccttttggtgtgtacagttccatcgtcgtgctattcaggaatggacgtggtgaatagtgttctctacagcaattctgctgggttattttttaaattttattttccactttacaaagatatatctatccactatttaaatcgacataaataatctggccatgattctgtattttatgacttctgtgactgttaggttttagaataggaaatgtgacagtctctaagaaatgatcatttcagttgccagatcctaggaatctataggccctttaaagaaacgtacattttaagtaacaccttacctccttcccaagaatttagttaatcactacatttttcttctatcattcctatcatgttataaaatcagtttctcaaaaagctgttctcattattctcatgtgtttctcaatttcttgttacaaaccctaggagtcagttgctaaaaatcatgattcaagccactttagcagagaaacaagatctagacttggccaagcttggaacagcaacggaaacagacttgacagtttcttcattaattcctgatgctttacaaacattaaaaacaaaaacaaaaataaaaaacaaacacatcaaggccttcccaaagaacacattttccatattttgatatggtcactttgtaatcattgaaccagtgattatgcaaataggcaaaacctgtccttgtgccaactgcctgagagatctaaaaggcaggaggggtgggggacatattgtccattgagatgagaagacgtgtggtggaatacgaagatatgaaggcctctggaattatttgcgtatgatttctaaaaaaaaaataactacggggaaaacttcttgaagttaaattaggatgaaaggagtgcctatgagaaattagatattcatagtgaaaagaaataagggatcaaaatatttttgtctcgtctattagtatttacggtctggctctatgcaataaaataaatagaaattcaaacctctattaattaaaacgatctctccccaaaagtggttcaaaatctgagggatgggggtgggatgaaaggaaaaagtaagtaatcagattacagtgggagaagtgctacgttagtagtgtggaaaacgtgttggaaaccgtgaggaataattaatcacatccagagagtgagtgggaggggtcatttcagctcagcctgaagcgtgagtaggctatttccttgtattgctagagggactgcatttctggacgtgagttttgtttaagccaagatgtggaagaatgaaagaacagatctgtttctggaatggcaagaagtaaaaaataaataaataaataaaaggatcagctatggcttagtcataggatgagttaattgagtgaggggtgggagagagatggggttgtagtggcttgcaacctaatctagtgtttggagccagatcatgaagagacaggtataccaggctaatgggtttggattttatcatgcaggcagtgggcatttaggaaagtttcatagcagagggtgtgccacggtcatagttatggtttagaaatcttgctccatactggttctgcaggtaggggattatatggcttgccttgcggcaattgtcagagttgccgtttttacattcgttggggtgattatttgattaatacttaattgagaccacagcaccatgaaaataagatccatgtttcgctttttgctcagaacagtctccctcgcaccaagcacagttcctggaacagagaagaacttcagtgatgatttggtgaatgagttaaactactgaatattcatgtgggccacataagtggtaatgaaggcccgaatcatggcagtaccagtgacagcaattaagagggaagacgtttttgtttgacatctaaaaaagaaaatcctgggttggctctaagacaggtggcaggagaaaagacaggaggacctcaagtttctagggtgggtaattaagggaagggcagttattaaatcagcagggaaagcaagaggaggaggactgggtttttttcaagagcagaagataaaaatttggtgttggatatgtattatagatgcctgcaggacatccatgtgggcaggaggcagaatgtcatagtggaaagaacaaagcagcagaggaccttggatttgggctttgtcatttaccagctatgtgacctagagtgtcatgaacctctgtgaagtcagatttctaatttagaaagtggagataagaatctctgccataattacctcagaatgattttataataatctaaaatttaaaaatgtgtgaggaagtgctttttatttttatctttttgagatggagttttgctcctgttgcccagggtggagtgcaatgcctcaatctcagctcactgtaacctccacctctggggttcaagcgattctgctgcctcagtctcccgagtagctgggattacaggtgtgtgccatcatgccaggctaattttgtatttttaatagagacggggtttcaccatgttggacaggctggtttcaaactcctgacctcaagtgatccacccacctcagcctcccaaagcgctgggattacaagtgtgagccacggcacccggccgaggaagtgcattttaaagtgcacagagctcttggtggactcccagttatgatcataatcactgcactgaatgtgatgcatccctcagcagagcatgggacaggtcaaatccagatcacaggtttaatgcacaggggccatctgacttgtcaaaactacaggtaagtctccactttgggccagcagcctcgagaatgggtatgacagtagagtagactagacttatcatcagaaatagaaaaatgtctctaagtcttctactaagagttacatattccagcttaagcagaatgagagatattaatatgagggttaggaggtgtgctctgttgctgatgatgtaaaaacaacttatgctcaaataaatatcttctcttgacagcctctggagtctttcttcttttctgaaagccaaacacaaacccttttatcttaatacactcttacttctagagttgtcactttctttttcagctttcatccaagacttctctcctatacattaggcccacggattcaatgcctcattcaaagtcacactaagtcactcccatgctatctcctgtagcatctgggttttccctagaagacactgactcactgagcaaccatgagccaaaaacatcttagcatttcgacttctggtcagttctaatgttctgtaggagtatggtggatagaaacagaacaattcagttgattgatttcaagatttctaaaaccaataatcacagtgaccctgccctgatggggaggtagacttgttggagacagtcttctgttagagactggctcctgtcttcaaaatgagccttaagcaaggattccttgcgggatggaaaagttgagtttctgagaacaatcaatagggctatatcttttgcccatctcaagttctttgatgtaatataaaagcaataatgtgcctgagaatgaactcataaacagttattcattttatagcataataaaagtagggcaagatagagttgagatttaggcaaagaattgggctggcagttaggagatcttgtttttcttgcaaggttgctcatggtgtcatctttagtgaatcaccaggtggctcctggcctcagtttttccaccagtgaaacacagagtggcattggaccatcaataaacaagtaagggtaacaattgcaatatatgtgcaattaacatgccaggctctattctcgatcttgggatagatccatgaatagaacagaaaaaagtaattcttgtgttcatagaactcagattctagtgagggaagagacaataaacaaaacacacaataaataaggaaattgtatgttggaagttgataggtgctgttaaaacacactgaacgggtaaggtggatttggatcatgagagtggctgaggactgcactggttgcaggctttggaaaggtctgggttctaaccttgactagtaactcctttccctcattacaacaaaataatagtaccctcaggtcacacaggaattgtaggagttcaatgaagtaaggaaagaaaaaccacttggcatgcaaatgttactattattatccttattttctaattccaaatatcttgactccaaaatcatgaatctcaaataacaaatactggaatgacaaaggacaatattattttaatatcacaaagaaaaccaaagatgtagttttggtcacatggtttgtttaaggatggggccaattacgtgaataagggtgatatttgctgaagcaggagtacctctaagattcccataggacagacagccacaggctctatttttagttcaaggatttacaaaaatgaaaaaaagaaaataaaacaaataaaagggatttataaattttaaaacaaagctttaaattttatatgttccaagaagcttccagaggctggcttttggagaataaagcacctgaacaataatcagaaaaggcaaaattgcctccttgggatattgatgttaacagatgtgactttttctgtttcatgccaggaacagagcgcttctggcagaggtgtgaatttcagtacatcactggcagaattgctgacctctgtgggaaatgtttaagtcctttgatgtaacttattgttgagcaaacagtatttctggcactaaaaacgttttgggtttatatctgtttccatcaatctttattcaatgacattatcattgctcacctattacagatatttctcaactgggaattcatgaaaagggcagagagttggagagagtgtttattgaaatgaccaaaagcttttgttgcatcctctcctgccctatgcttatagaggtcataaaatcactcaggggataagacattttttattagaaaatagtaaaagtagttctccctagacttcttcctgtattaaatgctacacatcttgaggttggtactaccaaaaaactatgccccattcattcattcatttattccccttatgatgaatgtgttatacatctgtgctatgtaggcacaggtgtaaaaaagcttacaaacccaacgagagccttctgcctctgaatacaatgctgttgtctggaaactaaaaaaaggccactccattaagtttgcagaggacgtggcctcacttcccaaatgctgccagcaaagttgtgctgccagggtttttggaggctggctcctagaaaggatctgggagtgatctgcaaggggtgagctctgtaccatgctgggggcagcaggatcattaagtacctaactgtttgcaggggaatagggttaatgggccagaacctttctggagcttagcgttcaggagttcaactaagtctccaaaagagcatgttaagcgatttagggaagttgattcaaactcagcaaaactttatcaagggccttctaaagagcaagttgggatcagatgtgaaaaggtgaggataaaacagtcccccttttcaaagagcttacagttcaattcatatgcagggacaggccaagcgcagcgaggatactcagcatatgaccttgaacttacaaaatcatcaaagcagctctccaaggacagataatgagattgaggctcagagatgggaagtaacttggctaaggatgcagtgaattacacctggttcagtctccagagcagcttcgatcacctcctcaggctctgcaggaactgagtctcaagatacagagctgactcagctagactttctgggtcacagagatgcatatgtacacagtaggaagacaaaaggactcaggcacattgagcgcttactctgtgtcaggcactgtccgaagtgctggtgcatactaagtgttttatatttattatatcatttaatcctcacaaaccatttgtacacgaggtaccaatgttgtccccatttaacacatgaggacactgaggaatgaggaagctaagttgctagcaagaaatcatacactcaataactcaggattaaaattctcaccatctggagactatgctactcatattacactattgcctgggacaagatacttctttctgtggcgtactgaagcctcataccgaacccagatttcagcaatgaaatttctagcagaacatggataagtaattatggtgttagttctaaaccaaaagcatcagatggatcctatctttatcagaaagtcaagaaaatcctcctttgatagcaagctggcttctcgtatatttctttaacactcaccctgaaagaacttctgtccatctgactatctgaccacccatccatccatccatcaatttatccaactattcagcaaacatttatggaggattccctatatgctgtgcactttgtaagaagctggtaatacaaagataagtacatacatagccctgccctggagaaagtaataatgaggaggtagtattgtaaagaaaaataattagaatccagtaaactctgtgtagtaactgagataggagcaaagttccatgggtgcacagagaaggtactaaggcagcttgggggagtcaagaacttccagaggggccatctggctaggatgagagctgcttggaagaacatggtagctttggatgtgtgtgtgtagaaaactgaggaacagtgagagggtgtataagtagaacattccataaacctttgatagcatcagatggggtggacactgaaccaggaattagaggacataggctttcagggctactattcaacctagcagtccaattactgggtatatacctagaagagtataaataattctgccataaagacacatgtatgtgaatgttcactgcagcacaattcacaatagcaagacatggaatcaacctaaatgcccatcaatggtaggctggataaagaaaatgtggtacatacacaccatgaaatactgtgctgccataaaacagaatgagatcatgtcttttgtgagaacatagatggagctggaggccattatccttagcaaactgacgcaggaacagaaaaacaaatatcacatcttctcacttataagtgtgagccaaatgatgagaactcgtggacataaagaagggaacaacagacattggggcttacttgagggtggagggtggaaggagggaaaggagcagaaaaaataactattgagtactaggcttagtacctagatgatgaaataatctacataacaaaccctcatgaccgagtgtacctatgtaacaaacctgcacatgtacccagaagcctaaaatgagagttaaaaaaaaagatgacatgggttttcttacttggcctggtataacatggaatatgatactgggtaagtcactttcctcattgcttagacaagaatattgttatgtggtttacttcttactcatagggatgtgattgaacatgttatagagcttgaagaatatttaactaatacaaaatgttatgattacctgtgatcctatcttccccattccccaaatgtacctcaccacacaaaagcagatctcaaccttaagagaaagcgaagtgacccatgactaagaataagacttagacatagccaaagcaagactaagcaaaaataacaaatctggagacatcacactacctgatttcaaactatactacaaggccattgtcaccaaaacattatgttactggtataaaaataggcacatagaccaatggtacagaatagagaactcagaaataaacccaaatgcttataggcaactgatctttgacaaagcaaacaaaaatgtaaagtgaggaaaggacacccttttcaacaaatggtactcagataagtggttagccacatgtaggagaatgaaactggatcctcatctctcaccttatataaaaatcaactcaagatggattaaagacttaaacctaagacctgaagctaaaaattctagaaaataacatggaaaaacccttgtggatattggcttgggcaaggatttcatgaccaagaacccaaaagcaaatgcaatgaaaacaaagataaatagctgggacctagttaaactaaagagcttttccatggcaaaaggaacagtcggcagagtcaacagaaaacccacagagtaggagaagatcttcacaatctatacatctgacaaaggactaatatccaggatttacaacaaactcaaacaagtcagtaagaaaaagaaaaacaaacaattccatcaaaaagtgggctaaggacatgaatagacaattctcaaaagaagatacacaaatggccaataaacatatgaaaaaatgctcaacattactcatgatcagggaaatgcaaatcaaaaccacaatgcaataccaccttactcttgcaagaatggccataatcaaaaaatcaaaaaacagtagatgttggcttggatgcagtgatcagggaacacttctacactgctggtgggaatgtaaactagtacagccattctggaaaacagtgtggagcttccttaaagaactaaaaatagaactactatttgatccagcaatcccactactgggtatctacccagaggaaaaaaagtcattattcgaaaaagatacttgcatatgcatgtttatagcagcacaattcacaattgctaaatcgcggaacaaatacaaatgcccatcagtcaatgagtggataaggaaactgtggtacatatgtacggtggaatactactctgccataaaaaggaattaattaacagcatttgcggtgacctgaatgagactggagactattattctaagtgaagtatggaaatggaaaaccaaacatcgtatattctcactgatatgtgggagctaagctatgagaacgcaaaggcataagaatgatgcaatggactttagggacttgaagggaagagtgggaggggggcgagggataaaagactacaaatatggtgcagtgtatactgcttgggtgatgggtgcgccaaaatcacaaatcaccaccaaataacttactcatgtaaccaaataccacctgtacccaaataacttatgtaaaaataaaataataaaaatttaaaaatatataaataaataaaaatatcaaacttatttatcttgcccttgcaagataaacagcaataaaaaaagaaagaagacttaggaaaattgtatctcctgtacaatgtctagaattctttctccctgacttatttacatgctcccccaagtccacagtataccttattactaactaatgcgcactttgttttacgtttagccttctctccttctcctttctaacttcactatggacattgagacctgcttttcccacttcatcaaacactattttcattattttggctcctatggtgttgactataatgaaaaaggctgaaaatctacaacaaactccaggaactcaatgagttaatgtgggctgggctctgactctcaactaagcatgtcaggatgaaaagcattcaggaaacaaactcccatactctctctccagtctcccccttcattacagacactgtcacatagaattcccctataagaagacttccccggaatgagaggccacacacggctgccctaccagggccagtaatgagtgccatccgaagttcagagctggagcccaattatctacatttattgcatcagaggcttcaacccttatgagttctggggtgcagaaatacaacacctcctcctgggatgtgatctgtctatgagagaagaaatatgaatctgccatgtggaaaaggattaaaaaaaagaaaactgagggttactggcctggaagagaggtattttgtgatggttgccttgacatccctgaaaagctgccaaggagaaggaggagagggagtaaaaggagtaggagggtaacaatgataataggagccaacgtttaatgagggcttgctgtgggccaggcaccatgctaagcgtttcacttgaaattctcctccagtgctcacaataaacctgtgacatagatactattcttgtcacaattttagatatgaggattaaacaggctaaatggcttgcccaaggtgtagagctaatcagatattgaagcgggattctatcccagacagaaccagacagaaatattggactcatggttttctagactggctacacatcaggatcatttaggagagctattccaactactgattcctaaacaatccagaggacatatgaaatcagaattgctagagaagcttcctggataatgacgtttcttggaagcttccctggtgggtctgatgtatgcagtcaggtttgagctcctttggagaacacacaatttgtgtgacctatagggacagaaggacaagttgagactggagaactactctacattctacaatcagaggtttcaccgagaaaaatgcatttatactgaaaactgaatggcaacaaggaatcagcccaagaaagaattgggggcagagggctccaggcagagaaaatagcaagtggaaaggccctggagtgcaaataaacttgaggtattcaagaaaggaaagaaggctggtgtgcctgcagcacagtgagcgagcgggagagtggctgagaccaaatcagaggggcaggaaggaacccaatcgagtgggcttgtgggtgacgacaaaaaatttggattttattccaagtgcaatggaaagccagtgtggggttttaagcagagaagtgatgacttttgattcacaatttaaaaagataatcttaggttcagacttattataagagggcaacagtgaaagcaaggagcacaattagaaggttattaataataaggcagcaatccaggcagggaagagggtggactgagccacagcagtaatttccttctctgagttgttatggggaataagtgaaataacataaatgcacccaggacaatgcctggcacagagtagatgataaaatatttgaatttctttctttcaactctgtgctacagcagggagccaggctttagatcaaaggaagaaaggagtttcctagagtcagggctgacctaagatggcaggtgctaactctgggagtgatgcacttcctaggaagggggaactgacagatcacttggcaagcataataaaaccatggttatgttcaggtcacttctaatctcaataacctatgatttccaataattcattcattcgacccatattcattgaacagaacctatatcctgggtattgtgccaggcactgtcattcaactagtgaacaataaaagtggctaaggaaattgagatttttactgcctgtctgacctttggtagtttgcagttctttattcaaagcagttgtgagaatacagtcctatatcacagcttggagtatattaaggtgatgttttatgccctaagttttttaaaactctttattgatttatttagcaactatttattatttggctattgtgtgttaggcactgaggatagaaggatgtaggaaagaggctacctgtccaccaaaatttatgatcctccttctgcatacctgttactaggagtagttgccagatgctacatgccccagcatcgcttgcaatttggtatggccatgtgattgagttcttgccatgagaacgtggtgtgaacaacagtgatgtacacacttctagtactggtctaaaaaaaaaaaagccttctgcaaggcactccttcatactcttttactttccagctggattgaatggagaagtctttaggaagactttgaaagccacttattgatgatggcagaagttcagaccatcctgcctatctgttcacttgcctcgtaatgttatctgtgcaagaaataaaagtatagtgtattggagctttcatatatctttttggtccctctgttatagcatttaccccactgttctacatgaggaggataagacaggcctcctcctgagtctcagagctggtagttgtgttcaggagaccatttacttaaaatcaaggttgtgattagatgagataagcttaagctccccatagaaacacataacaggggcatctaaatcatcctgggggatcagagggatgttgcccaagttgcaacctagagggtaaactggagtttaccagaaggggagagaggaaatgtattcccattagaggatcagcagaagtaaagcccagggcaagaaagaacatggggtatttgaggacatggaacaggttcagctgggctgaagtgagggtagagggcaaagttggggaatggtaagggagattgttggagggtaatagcatctgctatatcagcagaggaaaagagttctcatgtccttattagaacaccaggctgagagtctccagctttagcagagttaacaccttcccagacagatgcactgttctgcatagctcctttctttcctcctgcaagtgaagggccagcgtgtgcatgtgcacgtgtgtgtgtgtatgtgtgtggtgtgctgagggtgagaaagggaggcaaagagaaaggggaggaaggttgattcagttattcttgacctgagtcacatcagaaagccaacagagggtgtaggctctcagggtgttgccagccttgcaggatgaaggctgtggcgccgggagatttgtgcagtgggaccaccagctttggcaggtttaacagaaatgaacggtaccagcccaattccagcttaaatagacaatattgaaactctgccagaaagaatctgagcaatattttgcaaactttaataacagctcagagaaaccgatcagagcatttggcttcacagtgcgttattgctcagctggacccatgtaatagcagagaggaatgaatctattttttttccatttccagagaataatatttttcttcctcccaaactgtgaggaattcagtgaagtctcaatgtatttgtcttgtttcttatttcaacttctcgataaatcccccaaagggttttggcacccacagttaaggcagtcagtttactgcctgaaatatcttctcctattggaaattatatttctagaaactgtaactttctttggctgagactttaatttgtggctttgatgtcccacatgcaaggcactgaccatgacaattaggtaggtttttggatatgctgagcagtggagagttccatatattatttggaattcaagagtaattgacatcttcccggacctctgtagtagaaagaagatagttttggaacctgaaatgggataaaatctcaggtctacctcttatgaactgggtaacttaaaagaagtggtttaagcactatgggcctcagttttctctcacctgtaaaatgaggacattcctgagctcccaggtagattatataaaataaagggtatcaagtgcttgggatagtgtctggcttttaggagaatcccatccaatggcatctccttgccttctcttcctttccctaaaggctgggaaaagaggttgtgaagccccagatggcagcacaaggtattatttctaggttagcatatgaactcctcactcccagtctggagaacaggaaaggcccacatagcacttttatcattctggtaaaacagctgggttagggaatcatgtagatttttgaaatggtaagttgtttcccatgagaacaggggtctctgacgagtccaaaggatggggtagctccactcaaatggcagccttcaaaaacagaggttgccagctagttgtgagtagaactggttcccacagtagagctgctcaagtttggctcacctttgggacaaatgaagtggtttggcctcactttgggagtaatgttaaaggaaagatgaactgagatctttttatcttagagaattgttttccaaagaaagacaaactagaaaaactatggcaaggcagaaattaggggagaattattttcctttagataagactggtggtttctcgatgttttttggtgaagactacatgaaaaagattaaaacactctttctcatttgtcagtctctgcttggattctacctccctaaaaggccttccttgactacttttctccttgaagaaggcattgtctatttcctaactttgctttatgtttgtcataatatttatcatcatctgaaattacacatactgatttggttttgcatttagaacttgtcttccccagtggaatgtactcagctactgcatctcacttgctgctgtcttcctgatgtggcatttaagtaatatttattcactttgggaggctaaggtggatggatcacttgaggtcaggagttcaagacttgcctggccaacatggtgaaaccccgtctctactgaacaatacaaaaattagccaggcatggtggcaggtggctatagtcccagctacttgggaggctgaggtaggagaatcacttgaacccaggagacagaggttgccgtgagacaagatcatgccactgtactcccacctaggtgacagagtaagactccatctcaaaaaaaaaaaaaaaaaaagaaatacttattgaaggaagcaataaataatacaaattatatatagtcattattttttgttgttttttagagataagtaagtcataataaaatttaattatttctataaaatgaaacattaaaaatgaataatttcttagcagctatggccaagttttttggatttctaaatatttttagaagcagaattgatttttatccactttttcttacataaatactctcaaaatgttcattgtttggctgatgcattccaagttatgtttaggtaagtatgttacattttagaatttttatccacttcttggtaatcagaaggtataatccaaataaactgtcaattctattgtcatttttcttgaaatctgctctgttgtttcagatgtgtaaacctcaaacctcaaatttagggtaagatgccattctcagtccattaacaaataacatacatttatatggtctttaaatacatatgattattataagtctttttttttttttagacggagtcttgctctgtcgccaggctggagtgcagtggcgtgatctcagctcactgcaacttctgcctcacgggttcaagtgattctcctgcctcagcctctgaagtaactgggactacaggcatgtgccactatgcccagctaatttttgtatttttagtagagatggggtttcaccatgttgaccaggatggtctcgatctcttgaccttgtgatccgcccaccttggcctcccaaagtgctgggattacaagcatgagaagtctatttttaaaaacatgtatactggtgccctcaaagcttaaacattttgataaaggaggagtcgttttcatcatgcaatcaaatgtcaatcttactacaaagtgaaagagatcttagcagtgggaatagataaagcttcaataagatactttatacttcagagtgaaattcattttgttctcagttgttgagatcatatttgaagagtggaaggggcaaaagaaacaaggaccaccatgactggtgattagtgtcatgacagtccacctgggaaacaggcaaataaacatccagtattcacagctcacttgggactttctttattcttcataagaatgtgtggagctttctgtctctctcattctttccttaatgctctgcaaaaagaactgaaagcagtcctgggaaaacaacgcaatagtatttgcaaacgtttgatcctggagcagggattctctgccacggactatgtgatatgctataaactaatctctttaagcctcttaaatgaggtagtaataggacccaccttctatggttgttgtgagattaaataagctgacatacattgtcaagcactcaggaattcctcaattaatgaatattcgcagttatgagtagctctggcttgtgactacttcagccctttaacagattcttctacaaatgccacactgcaacgatatttgttttcttaaaatattgaagcagagaagcctcactgagcagcaacatctcatttgccagcgagacctagtgaagactgaggaagtcagcagccatgtgccttcatagcattagagcaattacaccctgcattattaaactccgtggtatacagttcaacttgctaaataataagaattaaatacagcccaaatagtagcactttgcctcaaccgtgaaagagtggcactcaccaatgaaactctctagctaaattaccaagtgtgaggcctaaatttaggacggggcaattcaggaacagttgattactggatctaagattatagatgttcttgtgaactgttgaaactgatggaataaatataaaataatggattattacagaattaggaaaaaaacctcgcctgggctggctggaattgttctgcactgttataagaaatgattgctgaaaagcagttgcaacttgtgcctacaaaaggcagcacaaatgacatccatcttctgtaagaaatttgatatggagactgaatagaacaatatattttactatcaaatttggcccttaagatgtgatgttatgctttaggaggctggaacttctcttatgctttatttggatgaaaacagaaacaacagaaactcgcagcacggcactattaaggagaccaggtaaagtcatgctgcaaaaagttggaaatctaccttctcgttttctaatcagccctgagaagaccaaagggcagaagggacatagtttgtgctttggcacaagactgaccccatggctctgccacctctgaactgtgtaatagcagccagttctttgacttccttaagtcttgcctttcccatctgtaagttgaggatggtggttatgataccatgtccacaggattggtgtgagggtctgggttagatggttaattattccattcaatccttgcaacaatctcactgtaaatgctccataaatggttgacattgtccatgattacattccacctccatgtcttaaaaattttgtaaccttggataaattactctaggtgtccctgtctcttagagaaaaaagatggaaaaaaatgactaatgatcgtacctaccttaccaaattgttgggatacactaatgagttacgtagagcatatttatcagccctctatgtatcagctgctgttattgttataactatgactactgcaactattttaagaatcagtcaagtccatgggaggagattcgaaggagcaacccttcctgggttgtggtcctaatagctatgtgttgtcaaaccaataatatgatgagagtcttggatttgctgttcctttccccagctgtaagaagagaagcctggaagccctgtctatgggaatgccaagagccagctgaggttatatcacaatgccacccagggcctcttactatgagaggaattggaaggtgggaagctggaggcagaaggctggaaagccattagctcaggctttctaatcttgtaggaccttgattgggacttcagatgtctttgcccaataaagtattttttgtcattaaaatcatgcaaatataagaatcaaatgtaaacattaaaaaaattcagaaatatattggtaactgcatcttggcactgttttctgctgttgcctctcttccatctcctccttccttttctccctctgttccaatgcactgcgagcttcaaagaatggaagcaaacaaggcctttctcaaactgtatcaggtctccataccaccttctctatcaaagctcatgtgaccaagatttgagctgcctacatttgtgatttggttatttgtcaaaaacaaaacaaaacaaacaaacaaacaaaaagaacttcagaatattaagtaggaaagcacaagagctctctaaagagacacacatggctttaaactccagctctagaaatacttcattaagcttctgtttcctcatctataaaatgggggtagtaataatatctcactcacaggaccactgagagggttacgtgagatcatgcatctgacattttaccagtgtttggcataagtaagggattatacatgctagccaatatttttggtctcaagtcttagtatccagaaagctagtactctagtagccagaattttcctttgtgataaaatcaattaaaatttatcattgtaatcatttttaagcatacagtttagtggcagtaagtgcattctcattgttgtgcaaacggaatttcctcctattatgtggataagacccttgagaccctgaatcatatctcaggacttgcccaaagtcacagcgagtcctggaacttacatcttccaacccttcagagttccctagaatttcaaaggctatctccttgtgctgactcagctgttggaatgagtagtgaagctatagacataaattatatcattcatctagtcaacacattcattctataaatatttttgaacatctaccatggaaaggacacatgcaagagattagacaaaaagcatctgttatttctttacaatagccttatcagtattttggttagtttttacttttgtccttttagaaatgaggccatgaagatccagacaggtttggtaactcttccaaggccacaaagaaaatagtgaagatgggattcaacaccagtggactatcactccaagagatttgcgttgaatctgattacagggcttgttaagattttttaggaatacagtttttttcctcaagccataacaacattataccaatatggtggagcaggtctttttttaccatggaaaaaaagaaaacacccagattcttctgtgaaccagaagtacctgaagtggaaaagaaattaagtctcattgtcatacactgagaacactgttgaattatcacaccagggtattcttatgccatgaggatggggatgatggtagtggtgatgatgatgatgataatggtaatgggaatggtatggtgatgattataatgctgataattatcaaccatggatcacctagtacatacaaagctctacatttagatatattcatacatgtaatatttgctgagtatcttctctttgttaggcactaggaatatagtagtaaataggacagctatacaaggttcctgttctcatggaatttacaatctaatgaacgataagattttaaacaaataattgcatatagtaatcctcaaacagccatatgaagttggaatgatgacaataataacaaaactaccaagactcttctattactgagtacctattatgtgccagacactcttctagctgctttacatacaaaatattttgttctacaggttacacaaccttaatgggcaccagtttcctcccagcaaatatgagcacagatgggtttttcttacaccaaagactttccatcatactctgctcttaggctagccttggatttattttctacccaggccatttgttcttcccatccagggttgggatctcgatatgtgggctaggataccaaagggtttgggtgctcaccttctaatggccaccaggtctctgtaagcaaacactcttttttcatgtagccaacataaagggagacagagattcccagccacaacactggaatcttcatgggggctgtgtgcaggtttcttcatcttctccaccctatagagccctggagaagatgccatctccattacagcggggctttcccaggacatggaggtaattaggcatgatcttggtcattcttttggaagagtcagggatatctccatattcctgaatatcctaggcaagatggcaataaattcattaataatattatccaaaatttgtgcagcctgcttcagcttacctctcactagctcataggttatctcaggtgatcctcattaaaatccctgtagggtatctttatttatagatgaaactcagcagccctgtagagaagcccacatgatgaggagctaacgcttcttgccaacagccacgtgagtgatgttggaagcaaatattctagctctggtggagtcttcagatgactgcagccctgattgacacattgactgcaacgtcaagaaagactgcatcagaaacacccagttaagccactcctagatttgtgactctcagaaaccatgagatataataacgtttgttgttttaagtggctaaatttttgaatactttgttaagcagcagtggataactcatacgaaatttaagaatacagaaattcatttttggagtcagacagttctggatttgcattctggttttgccagttatgagctttgtaacctcgggcaactcattccacatctctaagcctcaatttcctcatctgcaaaatggaggtaataatggtatttgtaccctagggtttttccccctgagtaattgaaatggtgcttgttaaacacaatgcttggcacctagtacgtagtcagtaaatggaagctataattattgttattataatcttttgagctcatttggcaaatatttaaaatactgattcttcttaaagtgccgactacaagcgttgctcaattggattatgcaaaaggaatttttttacgagggaggcatgctcagtcagagaacacaggtcttgcttgagattgcccgtggtgctgaaggacaagccaagattaaagagtcaaccagcagttgactgagcttttttctccttgtccacaaaatgctgatgaacagcattttgtaatgtaattaagattacactgaagaatgagccctctatcaccccatcattcaatcaccttttcctttaccagcaggagccaagagctcggctttaccttcccctacaaacaaccacctgacccccagctcattagtgccatccctgggatagtattcattgattttagggaccagagtccaatatttctctcccatctgtctttatggtctgcaccgaggtcaaagttaactacatactcattttccgggaggacatttcctgatgcgagagtgattagaaacttcttcttacttcccattcttcatactcaagtttctgttcttcttggcccaatggttcattctatctgtgtaatctgagggcaggtgtagaaaatggcttaccttgaaaaccataaattatctgtactcatcactttcagaacaggactcattaaaaaaacttatttcccacaacagtgttcagagagatgagttgccttttagcacactaacacctctgcctcttttaagaccattgagcttacttcttagaccaatgtagtaagtcaatccatacttatcaaaacaaacattttgatgtgactatcttcttaagtggtaagtgactttttcatggagaagtttaagatgattatacctttttggaaataatcccaactcttgataagcatactgctggcctaggggacaagggatttgcctgtttgttgtggcgtggcaacggatgagctctgtgaatctgggcaggtcacgacatctaagtcaaatcagtttcctcatccatgaaatggggatacctgctcacctactcttcaaagttttcataaaaatcaaatggtatggtatcaacaaagtactctaaaaataatttaaatagcttcaatgtatataaacattccagttataagaaattccgcaataaataaaccaggttttactaatattcctccaacacacaaaacaaaacaatgatatttgagtgatatatgcaatatgtgtatttatttatttggagactgggtctcactctgttgcctaagctggagtacagtggcacaatcatgcctcaccgaagccttgacctccctgggctcaggttatcctcccacctcagcctccctagaagctgggaccccaggcacatgccaccaaaccatggctaacttctgtatttttttgtagagacagtgtttcgtcatgttgttcaggctagtctcaaactcctatgctcaagtgatccaccctccttggcctcccaaagttctggaattacaggcttggccccataagtgtaaataataaaactgtatggataaaagagaaattaagaatttacatttggcaaaggaactgaagaaagaaagttaacacaaagatgacagattgtcaaaatataggccagaaaaccttaaagtaggtatcttgaatcacaagaaaatcagacaaataccagtagttagtctcccattatctgaggccttgttttccatggttgcagttatccttggtacagtaggtacagtaaaataagatattttcagagagagagagagattcacattacttttattatagtatattgctataattgtcctattatattagttgttgttaatcttttactatgctaaacttataaattaactttattataggtaggtattctgaggaacaaacatagggtttgatattctctgtggtttcaggcctccactggggggtcttggaacatatctcccacagacaagtgaggactgctataaacagaaaaaaaaggcatgaccaccttccctgcccctgccacatccccactcctgcctccaaatctaaggatttaaacaggtttctctcaaaatgagaaatgtaactggctaaggagtatgaaactatgctcaaagtccctgattatcagaaaatgcacattaaaacagtcagatacaactttacatccatcagattggccaaaattagaaatctggataatgccatgcactctgcagagagtagacaatggtttccccatctgggctacaatctggcaacatggagtgaaaggaggccctcacctgctctatgatccaggaagctccatctttggtctaaagcagataaattcttcccagttatttatatgaggcaacccacatgtatttgactagggtagtaggtaagtaaaatgtgatggaatgctaggcatcaaatagaaccttgagctagatgtacacatagtaacatggttagatttcagaagcagtgttgaataaaaatgaaaaacgatgaggtcttagagcacaatatcatttgtatggattgcatatatatccacactcaatagtatatattaaaaatatatcaaatgtattggcatttttgcattagtgggtagggaacagatgtgaaatttgaaaacaaggaggggaaaaatccacaagagtcccttgaaagagccgaaaaaatggtatgccatgaatcaagtagcactgctaactcaactctgtgcacctgagatgcaaaaagataacctgcatgcactgtaccactccattttttttaaaaaaaactatatactcaggtgcacatatacacttgaaagatcaaaggcatttgcaatgaaatattaacagttgttatttctgggtgctggcacgggatataactgttattttcttcttttgcttattatctgcatattctagactttctacagtggatctgcattccatttatatgaaggaaacaacttcatataaaattacttaaaaatcctggagatatatgtcatgttttcctgtctcagtaatctgcacacatacccagagtgtgaaactttgaaggattatgtccctgaaagatgacacaagtcttctggttgttcttctcatggaaatggagaggtgtaaaactttaaagagctgagcttttggcagttgtatttaccaaaagaaagaaatctgcatgaagagagagaaaatggcacattgggacaatgattttctttcattggctcccacaagatgcacaacttctcttccctggcacacagtttcagcaaggtttatttctggaaataagagatgaagccgagttttatatctcagagttaagggaaccctgagaataatacctaagggttcttagaatccacagcaattctgactttcacatccatcttatacaggtcttcatcatgaccacatcatgactttttgatccctgatttacttcaaccagcagccattgttggagtacatactgcgcatatataaaggtgctaattcatttaactttccaaaaaaccctttgagatgggtattcttgttatcaatattagcaggttagaaaattaaagcacagacagtttaaaaatttgcccaaattcacacagttagtaaggagcagattgaagatttaatccagcctggcttcagaacctagtcttagtgggtggctaaagaccattgtctctaggaactgccagatctcttttcccctgctagaaatccatttgcaaggaacacttatatatctgtcttcttccattcaggtgtcaaataatgccattggcttttttaatcactgggattttgaaacatttgcagtcctttccatggtgtggccctttctgtaattttttttcacaaggaataaaatctaatcacattgatagatgaaatacatatgttgttaataatgattatcgtagctaaaattaaaattcctctgaaagagggaaccatctttgttggataaaattttgtgatgagctctacagggtagaatgaggactagtgctcaaaaccataaaagttgatgataaaatgccctgagtgagatagtaagaggaattttgttttgtgcccagaaggaaagtagagcgaaaactaggaaaggagaaggagaatttatagagagaaaccaaaagaaggcataaatatctgaaggaataccagacactagccctgtgtagggttttataaacagggatgtccaaggataaatctgaaggtctacagacaacttctcttcctggcacacattctcaatagggtttatttttggaaataggagaggagggtgagttttatatcacagaggcagcatgtgtggaagcccagagttaagggaactctgagaatacttaaggcttctttgaatccacagcaatcctgactttcacacccatcttatttaatatctaggtcttcatcatgaccaccgctggcaagccatttattttctgcttcaccaggcaaacaaaaccagggcatgccaaggtaggcagataattatgttttttggagacaagatatcaaagtttactaagaagcctcgagtttctgtgattagacactgaggtcagagcagttttcagaagagcttctccagcaacagtgaacttattcaacagcctagatcacctgaagatgggaattatggaaccaaaaacattaggcctaccggtaatatagtctggatgccgcaaggggaggaagggagtgtaacaatttggccataaactgtcccagccacgttacacggttcattttatgtaactcttataaccctgggaggtggagattattattcccgtttatacaggaggaatctgagctcagagagattaaatcatttgggcaacatttcatagagtgaagaagtagtggtaccagaatttgacccagacctgtttccaaagtctagtctctttctacttggttatactctttcttttataggaataatcaaaagatacatagtagctgccttcagggaatatttaataaaaagggactaactggcaaaacattctcttttgatgtttccatcatttctggtgacagcttcttgcatttatcacagaattttccagttgtaagggaagtctcagagtacctctaaacaggcagatctttctgggattggaaggggaggggttaagttgaattttgattgagaaaatgtaacctagtctaagacaaatggaaacccattttaggcagaaggattcatttacaagaaggttgagaagcagctgcaggaggtaggcagcacggtggtagcacttcagagctaaagtggagagggaagcgtggatatagaatgtgattttcagttccaggcaggctcaattctcatcagctaagcagatgtgtgttgattatctactatgtgggtatcaaacactgtgctacatgttgggaacccgtagatgaatatggcaggaaacgcatgaccattaggagcctagtctaacaggagagttgtcagtggcctccaaagtatctgttattcttttcaccatcctgcaaggacttgaactttccagccataaagtctgagccaatcatgacactcatatctcttttgcatcagtgattggtttaggaatgggcaccagtctttcactgatccagtgagaggaagtgtggagcttttgtctgcttgtaaaagaaagagacattttttcttttcatcaagatatcagtgaagaaacttgtgctggaactgtggaaatcattttgatatcatgaaggcattaatctaagttagccaggaagacagggtcaagggaaacacaggaaaatgaaaccctaataatctaggaaactttaaatcaaactgtactttaaacttgcattatctcttttcacttatgtgtactcatatattccagtttgagttggactttctgtaacatgcagaaaaaacatcatatcatttcaaggagatataaaaatagatcattctaatatttggtaagtgctatgatataaatatgagtagagtgatatgagattttagagaagaggcattgaccctcaattctgggatacagggaatgatttctaagtaaatgatgatttatctgagttttgaaagatgaactagagttagatgaggaaggatttccaggtagagggaacaacatgtgtagaggttcaaaggcagaaactacgttcatgagaaatttcaaataatttggtgttactagatagtaacgtgcaatgctttgctggctggcaacgtgactgaagaggagctgggtttccctcagtaggtgaaaaggagacaaagttttaggcaggagagtggtgtgtctagatttgcatatggctgaatatggaggataagattacaggaagcaagactggaggcaggctttaaaaagtaggacattgtcacttgcaacaacgtggatggacctagaggacatatgctaggtgaaataagccaggcagagggagataaatattgcatgatctcacttatatgtgaaatctaaaaaagttgaactcatagaagcagagaatagaatgatggctaccagaggctggggagaaggaggggcacggatagggaaaggagagacattgatcaaaagatacagagtttcagttatatagaaggattaggttctggtgatctattatacagcatagtgactatagttaataataacatattatgtatttcagagtagctaaaagaatggattttaaatgttctcgctataaagaaatgataagtatgtgaagtgacagatatgttaattagtctgatttactcattccacaatgtatacttgtattggaacatcacattgtattacataaatatatacaattagtgtcaattaaaaataaaaaaaactttaaaaattttatttatttatttatttatttttatttttttgagatggagtctcactctgtagcccaagctggagtgcagtggcatgatctcagctcactgcaacctccacctcccaggctcaagcaattcttgtgcctcagcctcccaagtagctgggactacaggcacgcaccaccactcctgactaattttttgtattttagtagagacagggtttcaccatgttgcccaggatggtctcaaactcctgagctcaggcattctgcctgccttggcctcccaaagtgctgggattaaaaatgaagaaaagatttattaatcttataaattaagacagattaaaatgggaaaaaaatactagaagcaggaagcttattgggggtattaattcattcatgctcagtcactatgccaaatggtgccagacagtcacatacaacagggataaagaaaacagacacagatcctgctctcagagttcactgttaattgaaatcgttgtaaaagttcaggtaagagataaagacactgcagaaagggacagggtctctggaaatggactggtaggatcatttcaccatggaagacatgaaattcttccactgtaggaactgtgctttgcttaccccaaatatagcctgatttcaaataattaatcattttcttatacaaaacactactattccacttctgttcccaatatagggatcatgtggtgtgatttccacagcaaatatttctatcttcattatgccacattacacacggagtcctgttcttgctcttggctactctcatacaaacgttggctctgactgtggagagacaaaaggattgttagtccagcagtcaagctggtggtcaacactgatggattggaggaggctggatggagggtggtgttgagaagaatgctaatgttgctcagattgatgtctgatgtctgccatgggcacagaaaggatcttatggcaatcatgagtatatattcgctcattaggcattagctcactgtctgttttggccactatttaaaaaaaatgattactgaatagatgacttttttttttatacatcagaagatgtacaccctcttctgaaaacaaatggaacaaatggaagccaattaaaatgcgatcagcactaactgacaaaaagccccagaaagcattcttataaaagcactctttcaacttgttaacatacaccaccttaaaatactcaactctctaaaacaaatgcagtgtaagatcaatacagctatgagctctttttatttatgagaatctgttcatgcttagggaccatcagctgaacagaattgctgccattgccaaaatactacataaactaacagttatttcattttataaaataaaaggcatgtgtgtgtgtgtatttgtagagtcattgatcccccacggatcccaaaatctgtgaatgctcaagttcctgaaataaaacaatgcagtatttgcatataacctactcacatcctcttgtataatttaaatcatctctagattacttataatatctaatacaatgcttacatatcacttcatttatgtggattcaatgtagtatttggaaatgaaagatatgaaacttacatactataggaactgtgcttgcttaccacaaatatagcctaactccaaatgattaatcattttcttacactaaaaagtactcttccattactgctcattgtgatccttatattatgcacatcctccagtatatgcacatacttccatatactttaaatcatctctagattataataaatacctaatccaatacctacacatgatttcattcatgtggattcaacctagtatttggcacacagcaaattcaagttttgatctttggaaatttgtggaagttttttcccaaatatttttgattcatggttggttgaatccacagatgcagaacccacggatttgaagagctgactttatgtacgtatgcatcacacacaattttcttcagctgtggtttctggtctcccaagttattttatataccctatacaatagtatcttctaaaagattttgtgttttagaaagtaagaaaggtaattctaatgacaggtagcttctcactaacaaaagacatgcaataattccaggattcctgtgtattgtctgtaagaaaacaggcctcctttgcttttgctctaagcagcagccacaggcccttagagtgattttagatgcaatgtaaactgtaaatgggattatttttcaacaacatcatgaacttctgatggagtcataggtggatgttcctggagaaggcattaagtaagatccagagtgctgttggcctcatcactatttgggtgaccatcagcaggcagaagcctctgagtgaatgcaggtgaatccacacccccgatgttgggggcgggaatgcatgggaggctggagatcaggctgagcagatctcacctgggtcttcacttagactaagtttctggcctttggaatgggaggctcagccagtcaggctaattaggaatttcccagatcatgtgaggagagtggtctgcgtgggtaggcagagccaggcagggcacgccaacatgtcattgaattaccagatccctggtatgtgcaggagtcccatggaatagagataagacgtcctgtgtttgaatcctggctcatcaaataccagcttaccagccttaggcaagttctttaaactctcagagcctcactttcctaatattaagaatgggaaaaataagggagtgatgtaagaatgaaatagaatattttatacaaagtacctgaaagagtatttggcatgcagcatggacactcaaatagaaccaatctaaacttgttaattgtggtgaatgcccccaaataccccaaggattaaagtataaaatgccaggaaggcaaaaatggatttttttttttttttttgaggcagggtctcactctgtcaccaaggctggagtgcagtggtgcaatcttggctcactgcaacctccacctcataggtttaagcgatttggcttcccaagtagctgggaccacaggtgcctgccaccatgtctggctaaattttttatttatttatttttttttatttttggtattttttgccatgttgtccaggctgatcttgaattcc

SEQ ID NO: 32 - DNA, 193363 bp, Homo sapiens
aattcactttacttactaaatggtttcgggaggttgtttctccaggtaaaattgtcgcctctctggtcccattcccaccttcaaacattatatgcaaacagttttaaaaaatcttacagttctaaaaggcttgtgacaaaaaaagaggcagtccctctttcacattgacagaagaaacttcctctttcaattctagtagttgaagaatttatatttccaaattgtatgattataccgctactttttgatacatcaattatttattgacttcctactagaaagagtgaaattttgcccatttatactgcaccatttttccagtatatgaatattttactctttgtacatcagaaactcagtattttcattattatgactagagtttttttgtttgtttgtttgagttctacttgtccaataaggatgatgattttcttttagatgtaaatgttaacttcaatagcaagaattcaaaaataatattctctttgagattgactgtgaatgttattgaaaagtgtctaaattagtctgaggatcaatgagggtcaattcagttaggaattgaataatgaaacgtgtctctctgaattcccccggcaattgttttagtcatttatcaggccaaaattaaaatgtttttgtactacaagatggaagtataaaattattggacaagtgaaatcgtatcagtagttcctgactgacagcttctggagccacactagagcagtgattctcagtctaacattaggttatcatgatgacgtatgagtaaattcttaatggttaaatgtgagacagttcacatttattcccatagaaatgtcattctcatttgaattcagagatacttctttgctggaagttggaattatagctttacaccaaggagtgacacgtagactaatctggcaagccaaggtagtgtttggattgcaatgtcatgattctattttaaattcttgatggtagaaacatttttaataaggaaggtaaaaatactggaaaaaagtgaatagtgtaggttttgtgaggaaagttaacatttgtcaatgacaagcattaaggccacctaataaagtgtagacaaagtgataaatgaaatatacactgatgatactcatttcaatatgctaaaatacattaaatttaggtattactcttaatctatttctacttagtcagtgctatctgattacctgttaatagcatctgaactggagagctggaaaaatccacttttttatgaagcagtaattatagaagtactaaaaattacaatgtattagtaagtttaatattttgacagggcatggtggctcacacctgtaatcccagcactttgggaggccgaggctggcagatcacaaaattaagagatcaagaccatcctggccaacatggtgaaaccctgtctgtactaaaaatacaaaaattagctgggtgtggtggtgtgcgcctgtagtcccagctactcgggaggctgaggcaggagaatcgcttgaacccaggaggcggaggttgcagtgagccaagatcatgccactgcactccagcctggtgagagagtgaaaccccgtctcaaaaataaataaataaataagtttactattttaaaactggttaatcatttatgtattttgccagtaaaattactttaaaagatattttaacaaaagtctcatatccttgtacttcagtttttttgtgtgtgaatactatccctataccactacccctaaaacctcagaattatttgctttattttttcatacaacttggggaagggaaccatgggagtatgcacatgggatcataatccattctgtggtttggaaaaagaaaatgttaacctctgctttagagggtagctactagctttgttggggataaaagtgtaatacatgcacttttgaactctgaaagtttgccaatctgaaaaggggtgtttctgaagaccactatcttttacgaacacttaaaaataagtgtttgcagttgtgtatgggcacgatactgtattctttacatttttatggccctacagctacttcttatccctgcaagtatataaattaaaaccaagtcactttagaacagctttgaaactagagtttcaaaggtaaaaggatctcatgtttctgaatctgcgtaaagcaagatggctgtgatttgacaggtttaattgctagttttttataggtggatagaaatgaatagtttggagtctttaaaatgttttaaaaaatgtttgcttactatctatatatatgacattattcccaattagttttatatctccaagatatatatatgtatataggtatatacacatatgtatatatacatagtctatatattctatataagaatatattccaataagaatatattccatacgggaatatattagtcattgatgtattttgccggtaaaattaaaagatattttaacaaaagtctcatctccttgtacttcagtttttgtttttttttgtttttgtttttgttttgtgaatactatccccatacctatattccatacaggaatatagtctatatattccatataaggatatattctatatattccatttaatatattctataaaaatatatattccatataagaatatagaatgtataatacacgaatttgtactgagtagaatgtgtcaatacatatttgttgaatgaatgaaaatgaaggccaagtgtggtggcttatgtctgtaatcccaacattttggtaggccaaggtagtaggatcacttgagcacaggagtttgagaccagccttggcaacatagggagatctcatctctacaaataatcgaaaaattgccaggtgtggtggcatgtgcctgtggtcctaactacatgggagggtgaggtgggaggatcacttgagcctgggaggttgacattgtagtgagtcttgatcatgtcactgcactacagcctgggcgacagagcaagaccctgtctcaacaaaccaacaaaaaagtaaatgaaataacgtcaggtctaccagaagggagagtcatgactcatccaatttccagactaaaatagttcaagggccagaactccttaatttaaggggacgctgggttctcttgagaaagaatccagtatataaaaattacagtatatacttgtagcagtgcttcaagtcccctttcccaaagggacctgtggccactttctagagggactgtgaattggggaatagaaatactcagacctttgggaatatttctggttctgaattgatgctagttgctagggtctcaaaatgctactggaccaccatttagagtaggagtttatggtggtgaagtgacagaaaaattgagttttaggtcaaatttgagtccagtgagctcagtaggtacttgagcccatcctgtttattcccagttcagaaagtacagtcgttaaagacatacttggtaactggtcatgtccccatattggctctcatttatgggctaagggtcgttaggataggaagggtcaagtagaagctgttggaatttctcttttctgctgtataataaaccaaaagataggacatcactgggggaattgcagagattattaacactactatcatcaaatgatagaatgaggtagaagtgtttattcctattacatctccatttaatgcatctattgggcctctgcagaaggtagatgatcttaaaaccaatgactgtggattattttaatgttaatcaggcaagatttatttccagcagttttttcagatgtaatgtcttcactggaacaatgaatacagctcttcacacctgatacaaaaatgtgcaccgccccccccacccccaccccacctggccccttccccataccctgctctttatcaatgtgctaggaccactaaaagaactttgttttttggctgactgcagtagctcacgcctgtaatcccagcactttgggaggctgaggcgggtggatcatgaggtcaggagttcaagacgagcctggccaacatagggaaacccggtctctactaaaaatacaaaagttagcttggcgtggtggtgggaacctgtaatcccagctactgaggaggctgaggcaggagaatcgcttgaacccaggaggcagaggttgcagtgagctgagatcatgccatttcactccagcctgggtgacaagagtgagactctgtctcaaaaaattacataaataaataaatgaaaagaactttgttttttcttgacaaggttaatagtacaccttcacagtcttgcatcatgcatatgttggctcataggctctcagccataatatagtctgaagagatctcgattatcttgacattctacacaacatcacattggcccactacaatgatttatttgtatgaaaaatagttgcaccatcttaggtgaaagagggagggccaggtgcagtggctctctcctgtaatcctagcactttgggaggctgaggcaggaagatcacttgaggccaggagtttgagaccagcctgggtaacatggcaaaaaccctgtctctacattttttttttaattagccaggcactgtagcatgcacctgtagtcctagctagtcaggaggctgaggcaggaggttctcttgaaaccaggagttggaggctacagtgagctatgatgacaccactacactccaacctgggcaacagaatgagtccccatctcctaaaaaaaaagaaggaaacagattgttcattgttgtatgaaagtttaaatatatgtatagaaaaatataaatatatgtatagaaagtttaaatatatgtatagaagggtgcatatggatgcagtgtaggcaaaggggtgggttgggccagttccaagctcacctttctatattctacattgtgatgctggagctggaactctgcaacgtgcaattttccagtgacaggtactttttgttgggttctgccaataatgggctctagaggcaggatctggaaggttagtgggggaggaaaagactgaattcctcctgttgcttcctgtgagcttactgcttttagcttttgtgaatatcatttcttcccttctagcagcagcaatttctcatccaagtaggcttcagatcaagtttgcaacatttgcagaacctgctatattgcttcaacccacctccctcccatcagagaaccagataccagcactagctggctggagcccactcttctgagatttgtctgggtacttggccctgcctctaagctgagagacatcagcacctgtggattaaagcctagcttctcagaggtttcagctccatagggatcctttttcaagcttttaaattttaagaattctaaccctttccttttgtcccccttgacttagggacagaaactgcttcctccagttactacctccagaatcctgagttcactttttagctatttaattatctggttaataactttatacctaattaatattgtttatattaaatgttctctgtttacattactgctgtgttttttctcttaactagaccctgatggactacaataattttgcttggccagccttgcttcttgtgtccattctggagctagaggaagagatcacctctacctaaattagatagactgagattgaataaggcatagtctactaaagcaaaaatataaggtcctattaccaagacaggaaaggaggtatcagaaaaaaatcatatctaagcactaagtttatctttaaacttgggaagttgaaaagacaacctccagaatggaagaaaatttttgcagctaacatatttgattaaaaaacttggccaggcatggtggctcacgcctgtaatcccagcatgttggaaggccgaggtaggtggatcacctgaggtcaggagttcgagatcagcctgaccacatggagaaaccctgtctctgctaaaaatacaaaaaaattacccgggcgtgttaatgcttgcctgtaatcccagctacttgggaggctggggcagaagaatcgcttgaacctgggaggcagaggttgcagagagccgagatcacgccattgcactccagcctgggcaacaagagtgaaacttcgtctcaaaaaaacaaaaacaaaacacttgtatctagaatatagagtaactacaagtcaataatttaaaacacccaatattatatcaacataaaagtttaaaaacaacccaattaaaaaatgggcataggatatgaataaacgtttctccaaaggaatatacaaatggctaataagcagaggaaaagattttcaacatcactagccatcagggaaatgcaaataaaaccactatgaaatgccatttcatacctagtaggatggttataatcaaacagaaaataactgctagagaggatatggagacattgaaatcctcatatattgctggtgggaatgtaaaacggtacaactggtttggaaaacagtctggcagtttttcaagtagttaaacatagaattaccatattatccagcaattttacctgtagacatatacccaagaaaaattaaaacagatacatgtacatgaaaattcacagcagcattattgatgatactccaaaatggaaacaactcaaatgtccatcaactgatgagtggataaacaaaaggtggtacaatggaatattatttagcagaaaaggaaatgctacacattacaagatgaatgaaccttgaaaatatgctgaaagaaaccagtcatgaaggatcatatatagtatgattccatttatatgaaattccagaataggtaaatacataagacagaaagtagattagtggattccttgggctagaggagatggtgatgaagaggggggtatagggattttctgggagggtagtgaaaaaattctaaagtcaaatgttatgatcgatgcccaacaacgtgaatatattagcagccattgaattggtatactttaaatgggtgaatttgtgtattaggtaaattatttatcaataaagctgtttaaaaagtgttgtacacacagtaagcatacaataccttcttattcatgaattagtcaagaaaccaagtggattgaacaaattatacctctgcactttaggtgtatttagtggtaggtaaagaagaaaagcaaatatatccaattgtttccagtttccttaaagggggaaaaaaacaaaatttactgacaagctatttgggtgctaatattttatttctttttctcctatgaattaatctcaagtggatctctgctagcttactaatgctcactgtccaccacctcatgcagtcagaaagatgccatctgttctcttcagctgccaaagtgtcacaggttacccacaggtactaaatgctgaaaagataaatcttccagatgctcatcattttgcccaactattttacaatgatattttgtttaactttatatgaaaatgataatccctatgtgatgaaatattttgatctccaaaattgaattagcaaacaaatcttttatgtgctgagcaacatgaacatggtgcagtttagctatcggaagtaatagcattcatactgggacttacttagttttctgcattcagaaagagcagggcatgaaaggaatgtcattgaagtttagaatacccatgtttgctattagcatgtgctctccccatccgaggcccctgagaatggtggtaaagccaggtagctagtcaggtaggcagcagccctgatttcgacagctctgggtttttctctctcatcatcattccctgaaaccgtacattttgacacttagaactgtaactaggattttctttggttaaagttcaaagacattattttattccactcttgttttccagtagtgcttgatgtcatttctggcacctaagtgcttaataaatgttgaataaatgagtaaatgaataaatgaacaaattgaattgaagtaaataaagtatattattatcacctgtttcatagggtctccagccttcctgattcatgactgtcagtatcacagacatgttctcactctttcttttatgtatgacaaaacaggagctatgtaacttttcttgtcaatacagcacaggtattgctcaaagctttatgcctggaatgcttgtacatttggaaataatcagcagttagagaaaagaatcttacattgtggtcaaaaggaagaaatagttagaaatctattgttggcaaatatgtattttttttataaatatgtatcttaactgaaatattactaacttacttctaaaaattatttactgcttttctcatcactatatatatatatatatttttttttttttttttttttttttttttttgagtcagggtttcactgtgtcacccaggctggagtgcaggggcaccatctcagctcactgcaacctcagcctcccaggctcaagtgatcctcccacctcagcctccagagtagctgggactatgggactacaggtgggtgccaccacacccagcgagtttttgtagtgtttatagagacggggttttggatgttgcccaggctggtctcaaactcctaagctcaagctatccactctccttggcctcccaaagtgctgggattacaggcgtgagccaccacacccagccctcatcactctattttaatggattattttgattgggagtattctgaatatgtgtgtgggtgtgtacacactgttgcacataaaacacctattattttttagaacaagtgtaattaatagtgcaagactgcctgctgcccctcaccttctagcaatcctaaagctgtttcccagagatcattgctaatttcaagaggacagagacatactctttcatttctctctccgtcaaccaaaaaaagctgatgataagagagccatcatctgaccagtgtctgactcggtgtcctccctactgggtcattatcctttgtactgacatctactctgtactggcttcctggaagacacctaaccatcctccattatttctcactgcaatgacgaagtactgtaacctttctggaaataatggcctatcattatgcatctggtccctaccatgctctggctaaacatacccaggaccttctgaaaaaaagaaatctgaaaaagaaaaaggaagtcagaaataggtatatgtacaatcagtgtgagaagcagaatgctgtgagacaacgattctcagctcttactgtgcaccaggatcatggggaacagtaataaaactaatagatatccaactccaacctgagagaattagatccctttagtctgagatgggtccagccatttgtgtaatgtaaatgtcctccaggtgtttctaatgtgcaggttggttgagaatctctggtgtaggaaagaacttgagtttgagagtcaggtaatttcaggttcaaataatcaacttgggcctctccttttcagttttctaataggtaaactagggttgataggggtgtaaataattatagtgtctgtcacctgatacatggtcaataaatagtttccaggttaaagtggattactatgcagccattaaaacttttggtgggtagatcacctgaggtcaggagttcaagaccagactgactaaaatggtgaaaccctgtctctactaaaaatacaaaattagctgggagtggtggtgggtgcctgtaatcccagctactagggaggctgaggcaggagaatcactgaaccggggaggcagaggttgaagtgagccgagatcacaccactgcactctagcctgggccacagactgagactccatctcaaaaacaaacaaaaaaacaaaaaaagggatgtattgtctcacagttctggaggctggaagtctgaaatcgaggtgttggcagagccaggttccctctgaaacctgcagggcagaatcaatccttctctgccccttccttgcttctggcagttgctggcaatccttagccttaaggaaggcctcctgctgcagcactgccacctccacgtctgcagtcacagggcgctgtcctcacctgtgtctatgtctctgcatctcttttcctcttttttttcctttaaatatttatttatttatttattttagctatctcctactagaaggattttgttgttttttattttctttttagtttccttttagtttcttttcctcttcttataaggacatcagtcatattgggttacaggcccatcctactccagtgtgacctcattcccaactttagttacatctgaaacgaccctactttcttttctttttttttttttttttttgagatggagtctcactttgttgccccaggctggagtgcagtggcaccatcccggctcacagcaacctccacctcctggattcagtgattctccttcctcagcctccctagtagctgggattacaggcacccaccaccatgaccggctaattttgtatttttagtagaaacggggtttcaccattttagccaggctggtctcgaactcctgacctcaggtgatgcacccgccttggcctcccgaagtgctgggattacaggcttgagccactgcgcccggcccctactttcaaataatgtcacattcctaggtactggcagttagaacttcaacaaatctctttaaggaacatgattcaacccaccacagaatggaaagaaaagaggtaaaatgatgggttttggcttgagcaactggaaggataaagttgccatcagccaaaatggagaaggcggcagacaaagcacattttgggggtgaagatcagcatttccaaaatatttcaactcatactacatacacaatcagctgcttgttccacaactaaaaagggaggggagaattacattcttgtaaatgtatgtggattatggcaaaaataattctgagagctactgctctcataagaaattcatatatattcagaaaacagttattcagtttcctgaataaaagcttaaattgtttaaatgaatgggaagtttaaaaattgcatttcatatttgtcaggacccacccccgcccctttgtttttttgcaaatttacctttagcacacagtttcggcactgaagaggaaaaactctttttgaaaatctataaaagctttctgaactctttaagtaggcagagacgactcttaggggatgagtctaagtaaacacttagctcattatgtaaatttgatgtgtgggtgccaaagtcattataatatttcagttgaaagttactgaatgttcatagctttgaatcattttcagagagtttcatctttctttgaacaccttgtcatatttccaatgtcctagggattatttgactgtacagactaaaatctattcaaaatgacataaacaaaggaaaggctctactggagcatctcccaaaatgccagggaggggagagaagctgggcttcatgaagaccagtaactggaaacagggcccaaggcagctgccctctccagccccatctcttgggttcccagggctcttgtctctgcatctgatttgccttgtgtttttgcttcattttcccctcccagatgggcagttgcccctcttctgcctgctcatgctgcctccccatcctccagtggcgcccttagcctcagagtttatatcactctaggaagccagggctgacggctcaggaatctattctctccagaacctgaattcacatctttgcaagagggaatctgattggcccagcgtccgaaattgtttacttatggtctaatcagctgtgtcaggggggcatggtcatgttcattcattagaaaaatgtttactgagagcctactgtgagcctcttgctcttataggttatatggatattgcagagtaaagtccccactctcagtggagcttaaaatccactggtgttgaggaaaagtgtctgttttccaccctgtgtatatgtgtatggaacgggctggtgttagagcagggtggacagacatcctaaaaagataatattctattttgaaatctgccaaaataagagatgtcatatctgtctgggctaggctatactttcattttttttaaattgcaattgcaataaagagattcactctccctttatgccttatcagaagcggagagatctgctgcttagaaggtgagattcttcgtttgttcacccattcctgccccagggctgacatagagctttttgtgataggagcaggtacagggaagggggagtggggtgtgtgctccagtccacagtcaaacctctattcagctaaccagctggatgttctaccaaattataataacaataagggctgacctttctggagggtttacaatgttgctttgcagtggtctatgataatgtgtattatcttacttaatccttacaaccccatggaaaaggtccgcattttacagatgaagaaattaagcagaaagattaagtgacttgcccaagatctctcagttagcaaacgatgagccaggatttgaacctagagtcagtggaacagtcactaaattacaagatctccaaggcaccctggagatggcgatggttgaagcttctaactactgctagtatctttcctagacagaaactaaaagttcatggagatgtccagttattcttttcatccaccttatttgggatgcaaagtgacaagtactctgatttatagaactctgtaccttaaatgaataagcaggcaagctttttaaccaaaaaacccttaagcagaggacttgtgggagttacaagttctcctccctcaagactcacaacttacctttttgaaaagaccatagcaacctttagagtacctgtcttcagtgtcttgcccaaacttgttcagcaagcaagtggtgaaaggaagacaccacctaaagcccgtggccttaaccactaaaatacgcaactcaaaggcacttgtgatggtaggtaattctaagagactccaaggtaattgtggtctgttgatcccatctgctatctctagttgaaagaaaacctttgatgttgtattggggtgtgcgtggcaggatccaaagctccttatagtggattttcctaaaaatctccactaaaatctttcaagtccaacccttataaagccttctgtgaattctcatcccctaaagcagagttgatcattccttcctacctcccacaatgtcctttgaatatatttccattaaattatgcaattatctcattacaatacttttattttttgaatttatgacctgtgagcttttggaggtcagaagtttctgctgttctgtgcgctgctgaatccccattgcctaagcgctgtccccagcatgtggcaaacacagattaatgcttgttgaagaaagaccagaaagaaagaaaaaaggaagaaagacaaagtgataaccaacttctgtgactattttcaaaatctttacaactattagttttcttatttctagaactaaaactctttaaagtgtctagatgtctttcacattatcaaagaaggaatctgatgtctttgtggtatctgtttatgaccttgttctgagcccaaatccaattattcttgggtaatcttgattacattgcaaactttcaaattctctctcatcacacacacacacatacacacaccacaacacacaacatgtgacaatcattctattaatagtttatatatcttatcatgctgtatctaccatttactcagaagtcaaattaaatctcaggtgggattagtctgtcatttgttttgcccataaaacacatagttagcagaagtgaagtttattcagctaattaaaagcttactaattgaatttactttcaaagatattactcttattataaacaaatctatgtgctttaggaatgtaccattatcttagttataatttgagtttaggttgaaaacagaatgggctaggtttagggtggctgggatctgaaataggagcaaccagagacttacagctgatgaagaatgggaattgcagtagtcaggacacttatggttgcaaatgacagaaaattggcttttaccaattaattattgggccacataataacctaaaagtcctgggatagcattagcttcagtctcagctggatctaggtgtttgatttcattcagaccactctccaaatccatttttcatttctgctttgctttgctctggttttaccctcaggtacatgtttcccatctggtagcctcccagaggctgtagtttcaagatgcagaaaagagttcatttctcatttctctctttcttctctcagtatatcccaagaatgtacacattctgcaccaattatggaggacaacagtatgtgattgatgctctgattggctagctctggaccacatgaccaactctgctctggtggtagagctaattccacttaaaccacatcaacagagaatgggtaagatgtgtttcctcaagggagactgtaacactattagaaggaggagtgaaagttggcgtgtaagaagcaaatgatcactactgatatgtgggcatttgaggtgaattaaatttttacttgaattattttatgttttcatactcatcagagtttgtataaactatggtaaaacttactgtcagctctcagcatgcttaactggtcttttactgtcatcatcatatgaagacaatatctgttatggtctgaatgtttgtgtccccttcaaattcacatgttgaaacctaaccatcattgtgctggtattaggaggtgagaccagtgggaagtgattaggtcacgagggcagaaccctcatgaatgggactagtacccttgtaaaaaaggccccagagagctgccttgccccttctagcatgcaaggacacagtgagaagacgccatctataaactaggaagcaagccctcaccagacaccaaatctgcgggcatcttgatcttgcactttgcagcctccagaactgtgagaaataaatttctgttgtttggaagccacccagtttatgatatttttaaatggcaagccaaatggactcagacaatacccaacatccaaataaagaactttataatttatcttcatttgctgctgctcatccctcttatttctttcatctgactttggtctccaggtaaaatgaacagaaaatgggcataaattgaggtatcctatgacaaatgcatttgctttttctatagaattacatcctaaaaaatttgaaaattcactttctcctacgactaccttttttttttttttttttttttgaggtggagtctcgctctgtcacccaggctagagtgcagtggcgcgatctcggctcactgcaagctccgcctcccgggttcatgccattctcctgcctcagcctcccgagtagctggtactacaggcgcctgccaccacgcctggctaatttttttgtattttcagtagagatggagtttcactgtgttagccaggacggtctcgatctcctgacctcgtgatcctcctgtctcggcctcccaaagtgctgggattacaggtgtgagccaccgtgcccggcctcttaagactaccttagaaagtagattgcaaaaaaactttaaacatgtatgtatttaaaaatttaataacaaaaccccccaaattctgtcatgatcttgatcattagaaagatttatgtaattggagaatttcagaaatatcttggcggcagaactagatgccttttgaggttcaatttaattctaacatcccgttaaaatttaatgtacaatatgtagagaaggacagcaactacacactgtacaccctaagactgatttttaaaaaagcaacatcaacttcaacatccaagtatcctatactttacacagtgcctggtatgtaatagttgcttaatgtttgctgaatgacagtgtgatcaaaggagtgttgttacatctgtcactctgaggtccttctggtgatgttgccatatcttataacatcaacaaatgttttcttaaaaatgaaattttcaggtgcattggctcacacctgtaatcccaacattttgggaggctgaagtgggagaattgcttgaggccaagagttcgacaccagcctgggcaacacagtgagacaccatctctaccaaaaaaattaaaaaattagctagtcatggtggtgtgtgcctttagtcctagctattcccaggagtttgaggttgcagggagtatgattgtgccactgcactccagcctgggtggcagagcaagactcggtctctatttttaaaaaaagaaagaaagaaaaatttgccttcactgccagttctacattgtggaggatactttgttttggcccctagagggagcgctagcctcctctataaatctcatcctcagcactctcctccagggttttcttacgctacattaaaagagaattgagaagaaactgttaaggtcaaaaacgtttcatgggcatgtttgtaggagcgtggatcaatccagtgagtgtggatcactgaaatcaatatgttgaatggatatctgtgctctcacgttcattacaacattcttcagaatcccaaatatacaatcaacctgtgttcatcaacagagatggatgaagaaaatgtggtatatatgaacaatagaatactattccacctaaacagggagaaattctgtcatttgtgataacgtggataaatctggaggacattatgctaagcgaaataagccaggtacagaaagacaaatacctctgacctcacttatatgtggaatctaaaaaagtcaaactcacaaaagtagaaactagaatgctgattaccagaggctagggaggtggagaaggaggaaattgggagatgttgatcacaaaatacaaagtttgaacaaaaaaaaaaaaaaagaaaaaatacaaaatttcgacagacaggaggaataggttttgagatctattgcactattgattatagtcaataataatgtattctatatttcaaaataactgagtaaatttcaaatgtatcaccataaaaatgataggtaagtgaggtgatggatatgttatttggcatgatttatcattccacaaaatgtacatatattgaaacatcgcattgtatcccataactgtatgtaattatgatatgtcaatgaaaaataatattactaataaaaattttaattttcagttgaaaattaattaattaaaaaatagcacaatgatcaaaatatattggttcttattttctctgtatcacagatgagaaaactaaggctcagacagctcaaatgtttgcccacatttaaaccaataacaagtgacagagctggggcttgaactgaaatctttaaatctaagtaatttggggggtctgggtaagggacagggatggaatcgctatgacaggatgagactaaaatatttagatgtcatctacagtgagatttgtaccttcactctggcgattcaccatcctttgagaaggaatttgacttttggaaacagcctaaataaatttataatcaattctggagaataaagtgttttggggaaaaatgaaacagcaagtcaaaataatatttcttgttctcttgtgtgcttttgaaacttgttctgaagataatttcaaatttggaaggaattttatgcagtgtcagcattattgaaaaatgcactctttcccgaggtactactttgaaagataacatttgcttggtgtttgctcatatatgtgtgtctgtattcatttcctgaacacctacatgtgctgggattcagtgatgaataagatacagtcttccctcatgaagtttgtgatccacttggggaggcaggtaggtaaatagtgacttttattatgtagagattagtggtataataaaactccttccagccgtaaaatcactggattgtataatatgtaacatcagtctaaattcttttttttttgacaccaggcaagataaactatagatgggtaaataaatacatttatttacatatagttttcaaagagtcattctgcctgagagctttgggaaaagcttgacagggaggtgacatttgatctagggctcaaggtaattttataaaaatgtgcaccagagacaaagaggtattcaataaatatttcttaaatgaaccaacgacataaggaagcaccagtttttcttgagatctgtatatatagtgttgtgcctgtctaaaagctgaccgtcctatttaaattatgtccattctggtagaaaaagcccttttgaagtcgtcttatatagttggcagagttggctaactgaatgaataaaaaatgtaacataaccaaatataggccaaataaatttatgttgctcaacactaaagctttgacaggtacaatcaatgtgcagcagcctgatttcttgtctcagctgtttcattaaaccagccctgagatcttcctagcattaggccacagctttcagggtctttattctttcctaggttgcatattctgtatttgctcaagattaactgtctttcagtgttatgtttctgaatatatttaggcactcccttgtgaagtcacaaggatgggaacaaagcaagagctggaccccacttttcctcgttttttttttttttttttttttgacaggctcttgctatgtcacccatactggagtccaatggtgcagtcatggctcactgcaaccttgagctcctggtctcaaagtgatcctcctatctcagtctccccagtagctgggactacaggcacacactgccatgcttggcttttttttttttttttttcagagatggtatctcgctgtgtcacttgggctggtctccaactccagggcttaagtgatcctcttgccttggcctcccaaagtgctgggattacaggtgggagccaccaaactgaacctacttttcctccttcccaccagtgatgtgcgggcatcactacagtaggcagaactgctctgctgtggccagctctgcagttccaggggggccagtgtttctccagagtggtgcatggacccctgcctcagcgttacttggaccattgcttgcttaacatgcagattcctgggccccacttaaaccaataaaatagaaacctttgtagatgagacctataatgtatctttatttttcataggtttttggggaacaggtggtatttcgttacatgagtatgttctttagtggtgatttgtgagattttggtgtacccatcacctaagcagtgtacacacaacccaatttgaagccttttatccctcacccccttcccaccctttcccccagagtccccaaagtccgtcgtatcattcttatgcctttgcatcctcatagcttagctcccacttatgaatgagaacatatgaggtttggttttccattcctgagttacttcacttagaataatagtctccaatcccatccaggtttctgggaatgccattaattcattcctttttatggctgagtaatattccatcacatacacactacagtttctttatccacttgttggttgatgggcattttgggcttgttctatatttttgcaattgcgattgtgctgctataaacatgcgtgtgcaagtatttttttgtataatgacttctttcctaaaatgtatctttaacaaacaccaggtgactatgattcttgcataccctgaagttaaaaatctgtgaagagagaaaaaacaaaggagattcttactttttttctgtggtttctagttttcttgggaaatgactgattatatgtagtcccctcctagggaccaccctggacttcagccttcttctcacgtaacaatccactggcgcgattattattaacttgtttactaatgacaagttggagtacaagggactgagtgctctcaaaattcacatgtagctctaggcctttacaactggagagtctaatttgaggggtgttaagcgataattctgaatgacttgcctgcagaggaagaggtacagaggacatggctgaaatcctgagggccaaagatagtggcacctccaatgcgtgagggagaccacgctgccagctcttgagagatggtatttttgcttgttttgaagcttttctctctctttcttttttttttttttttttttggcataaaaagtattacatatttataggaaaaattaaaacacagaaatgtgaattggaaaatgaaagtcaatggcttaaataccctcaatagaggagtggttaaatgaaatggggcacatctgtcttttatagaattctatatagccattaaaaagattagatacacgtattgaccaggcgcggtggctcatgcttgtaatctcagctctttgggaggccaaggcgggcggaatacctgaggtcaggagtttgagaccagcctggccaacatggtgaaaccccatctctactaaaactacaaaaattagctgggcatggtggtgggcgcctgtaatcccagctactcaggaggctgaggcagggagaattgcttgaacccgcgagttggaggttgcagtgagctgagatggcaccactgcactccagcctgggggacagaggaagactctgcctcaaaaaaaaaaaaaagatacatgtatgactacaggaagagctttaccaaggaaggtaaataaacaagaggcagaacatactatagtatgatctcatgtatgtttaaaacaagaagatgcatgtgaatatatgtatatatatgtatataaagtatagaaatgtatatagcaaatagaaggaaaaattgctcaccaaactgttgacaatggagtggaaaatgagatgaattaatatgggactttcatgttttgttccatttgcttctttttctaaacaattatttttctatagaaatgtattttatcttttttttcctgctccttgtcgagcagagctaccccataggccgtgtgcccagagtagctggaaacatagttttaaaagacatgcaattttttaatttttcaattttttttttttgagacagagtctcgctctgtcgcccaggctggagtgcagtgtcaaaatatccgctcactgcaagctctgcctcccgggttcatgccattctcctgcctcagtctcctgagtagctgggactacaggcgcatgccaccacgcctggctaattttttgtatgttttagtagagacgggttttcaccgtgttagccaggatggtctagatttcctgaccgcgtgatcctcccacctcagcctcccaaagtgctgggattacaggcgtgagccaccacgcccggccaagacatgtattttaaaaaaaaaaaaagctacagttttttcttaactgaaagttccatgtgggagactatcttgaaggctgtatcttttgcttttttttttttttgagaaagggtctctgtcacccaggctggagtgcagtagcgtgatcacagctcacaccagcctcaacttcctggggtgtttcccccacctcagcctcccaggtagctggaactataggcatgcaccaccgcgtaattttttgtattttttatagaaacggggctttgttatgttgcccaggttggtcttgaacccgtggcacaaccattctcccaccttggcctcccgaagtgctaggattacatgcatgagccaccgtgcctggccaaggctgcatctccacctttgaagggaatgcccagggaaggagcctagctaggtggaaatgaagagctgggatacacgtgttcattcactcactccataaaaatttctttgccagacactggattaggtaatggagatcagtggtatccaagacaccatccctgcactattacaggatcctgggggagaccagtgaataaaaacacaatggaaacagtttgataggtgttagtattcggatatataggaggtattagggacttggatttggggatgcaggcaacatttctggaataagtgacataaactgaaccctgaaggatgtgcaagagttaggaaatgagaatgagaaacagttctggtttaataagggtacagtaagggtgatggctcagtgggggtgggcaagcaagctgagctgtttccctcctcttagagagaaatacttgggctgtgcctttctggaggcaagacaaagtctgtttgtcacatggaatatctaggtgagagccaggaaagggagaaatggcttgggattttatttgctcttaatcttctcctgtctcaaaatgcagaccaggaaggttggtttcccaagacacacttgtagtttgtccactaatcctggacagtatttaaaacatgttgacttgtttgccaacacttaaacattgtgggattttacataaaaatacagattttcagccttttttgaaatacttgataattgggcctcaacagtcttttacaaagggcaggaacttgccagtttgttccctccatgtttgtctcacttattggtttcacttaagtttttgtttttgttttttaacagcaagttttattgaagtgacagtatacagcagtagcacaggtactgttccttgcagagcagggccatgccataggcactggacccaaaatagcagcccagaggcagttcggcagtggtatttatacccactttattttattttgtttttttaagttccagggtacgtgtgcaggatgtgcaggtttgttacataggtaaatgtgtgccatggtggttttctgcacctatcaacccatcacctaggtattaagaccagcatgcattagctcttttccctaatgctcttctccactgcactcccaaaacaggccccagtgtatgtggttcccgtccctgtgtccatgtgttcttattgtccagctcccacttataagtgagaacatgcggtgtttggttttctgttcctgcattaatttgctgaggataatggctcaaccttgcagtggctggtactggttgttcctttcctggaacaactggaagcttcatccatgtctctgcaaagtacatgatcttgttcctttttatggctgcatagttttccatggtgtatatgtaccacattttctttatccagtctatcattgatgggcatttgggttggttccatgtctttgctattatgaataatgctgcaatgaacatacgtgtgcatgtatctttatagcagaatgatttgtgttcctttgggtatatacccagaaatgagattgctgggtcaaatggtatttctggttctaaatctttgagcaattgtcacattgtcttccacaatggctcaactactttacatcccaagcaatagtgtaaaagcgttcctatttctccgcaaccttgccagcacctgttgtttcttgactttttaataatcaccattctgactggcttgagatggtatctcattgtggttttgattttcatttctctatcagagatattgagcttttatttcatatgtttgttggccgcatgcatctctttttttgagaagtgcctgttcatatcctttgcctactttttaatggggttgttagtttttttaactgtaaatttggcttagagtttttaacctcttctatagtggttgtatcttcccttggcttctttcggaaatcctgaggaagactggcaatccttcacttggcagagaactagaagctttcatggtaccccagtggtggtggatatatgacccagcaggtgtggcagacagcaatcttaatgtccaaaaagcagtcatggaactgtcactgaaaagacttcaatgacgatatctatcaacagtggtgctttgcatgttgatatacaatttgcctagcatcatttgggaaaaaactatcctttctccttcaagttacctttgcacctttgtaaaaaaatcagttgaaaataaatgtgttggtcaattttggggctgtttgttctgcttcattgatctatttgtctatcttgataccagtactatactttctttttttttattactgtagctttattatgctatcataaatgggattgtttgcttgatttcttttttggataggttgttagtagtgtattaaaatactgttgatttttgtatattgattttatatcctgcaactttactgaatttattatttctaacagttttttggttgagtctttaggattttttatatataagattatgtcatctgtaaacagatgcaatttaacttctctctgattcggacaccttttctttctttcccttacctaatttctctggcgagaacttctaggactatgttcaatagaagttgtgagagtaagcatcctcatctttttcctgatcttggaggaaaagctttcaccttttcaccattgaatatgatattaattttggacttgtcatagattgcctttaatgtgttgaggtacatttcttctatgtttaatttgttgagagcttttatcatgaaaggatattgtacgtggtcaaatgatttttctgcatctattgagatgatcatatggcatttatcctccattttagtaatgtgatttatcacatttattgatttgtatatgtggaaccatagttatatcccagagataaatctctcttgatcatggtaaataatctttttaaagtgctgttgagtcaacttgccaatatttcattgaaaacttttgcatctatattcatcagagatgtttgcctataattttcttttcttatagtgttcttatctggcttttgtatcagggtaatgctggccttgtaaaattagtctgaaatctgaaagtattccttcttcttcagttttcttgaaagagtttgagaaggattggtattagttattctttttttttttttttttttttcaagatggagtttcactctgttgcccagcctggggtgcaatggcatgatcttggcaacctccacctcccgggttaaagtgattctcctgcctcagcctcccaagtagctgggattacagacatgtgccaccatgcctggctaattctgtatttttagtagagacaaggtttcaccatgatggtaagactggtcacgaactcctgacctcaggtaatccaccggcctcggcctcccaaagtcctgggattactgacatgaacctccatgcccagctggtattagtcattctttaaatgttttgtagaattcagccatgaaaccgtctggtcctgggctcatctgtgatgggaaattttatataactgattaaatctccttactcatgattgatctattcagattttctatttctttatgatttagtcttggtaagttgaatgtctctgggaatttaacaatttattctaggctatccagtcttttgacttataattgttcacagtagtttcttatgatcttttgtttttctgcagtatcagttgtaatgtccctctttcacttctaattttagttacttgagttctctcttttttagttagcctagctaaagatttatccattttgtttctcttttcaaaaaaccaactattagttaaattgatctatttttttctagtctctattttgtttatttctgctctgatctttgttattttcttccttctactaactttgggcttagctggcttttctttttctggtttcttgaggtaaccttagtctgtttatttgagatctttcttcttttttttaataagtcatttattgctataaatttcccctcaaaactgcttttgctatattccataagttctggtgtgttttgtttccattcttgtttctctaaagatatttaaaatttttccttttcatttttcttttgacccattgtttgttcaggagcatgttgtttaattttagtttcaatttttcctacatttctcctgttactgatttctagttccccttcattttttaaacaaatttttattaggtatagaattctagggtgatagtttttatcttttaggattttaaagattttgcttcacgttcttctagctttgtattgtttccaatatgtaacctctgtcttcttttttttgttcctctatatttaatgtgtcttgttcatctggatgcttttaaggttttttttttctttattactggttagatgcaatttgattataatgtacccttgtatagttttgttcatgtttcttaagcttggaattagttgagcctagggtttgtgagtttatagttttcatcaaattagaaaagttttccactattatttcttcacgtgtttttttctgcttctgtcctttctttgctggactccagtggcacatacattgggtttcctgaaattgtcccacagctcaatgatgctctattttttttcagtgttttttctatttgtgtttcattttggatcatttctgttgctataccttcaagtttattaatcttgtcttttgcaatgttcagttagctattaattttattcaattgtttgtctttgtgtttttttatttcagacattatagttttcatttctagatgattgattggggtctttaaaaattttgcattgtctttattgaatgtgctccatcttttctctggctcttgaacaatggaatacattacaataagtgtttttgtgtttttctctactaattctatatctgtgtcatttatgggtctgtttccatcgactggtttttctcctcattatattttcctgtttatttgcatgactagaagttttaattaaatgccagacattgaaaattgtaccttgtagggtggctacacttttctattcctatagatattgagatttttttaggcagttaagttacttggaaacaatatcattttaggtttgctgttaaacgttattaggtgagatcacagttgtgttaagtctgaggctaattctgcctcacttttttggagcacctacccaacattctgtaaattgtgatattcttcattctggctggtaggaacaggaattttttttggtggggggggctctgtttgaattccaagtgttgccccttataatgctttcaaatggttcttttcctatccttaggtagtttccttacatataagctgatcagtactcagctgaaaactcaggcaccctctgcagatctcccaagttctctctctccgcagctcactcatctctggtactctgtcctgggaacacgagccagcttatctctctggacttccaactttgtctcaggaagtttgatgggctccccttccatgctctgtagcctggaaactctctctaggcagaaagttacagcaactgtagaagtcatttcatttctttttacttctcaggaaacatatctttgttgctgatgttcaatatcttgaaaacccttattttatatatactgctgttatttcagctgggtgagtaaatctagtccctgttattccatcttggttaaaaacagaagtttctcaactgtggtgttttgagacttcaatcctaaaatattagtgatatttggaaatgaatgggtggaggtaagaggtcaatcatgggttaatttccaaagaagaggaaaaactgcatggatatgtacaaggttagtccaaatgggaatatttgagttatttgtttattagtgatgagtcttctctctttggtggtggaagttctattgactaagaagagcatatttttccttatggtctcactgtagatggggctatataaaagcaaaaataccagggacgatctgtcttccaaatctaaatctagggtagtttggcatatacagcattgggccttattctctctggagactcttgtgtgggataattattattattcataatagtaacagccattacttcttgagcactttctatgtacaggaatccttctatgttacacaaatttatataagtatacaacaatctcaataggtagatactttatcatcagtttttaaataagggaactgaagttcagatagataaaataacacaccacatgtctcatagctaccaaagttacagttggaatttaaacccagatcaatatgacttcaaagccaaaatgcttatatagtatggcatgctaaaggaactctatacagccactttagaagcttcttgagaagatcctaaggaatcaagaattccatagcatttttacatctccacacacatttagcaaaacatcctaaggaggaagggatagagctggcattaaccaatattggcctggattgaatcaaacctagggaagagaaactaggggacttgaatggggctctcactcatcgtagatgcttttggagttccagggcactgtccgaattttaacctttgaaatctaaacccaagttgaacagagattgacaggtctttccgagaagaaatctcatgtttgccgaaagcctgggggaagagttggtcaagacgtcatgtcgttccactttagcaaagtactttgaagataaaatcaagaaagttgaattcttattatgttgggtaagagctctaaagttctgttgctaaggccaggagtcaattgaatttaattcaacaaacatttattaaatgccttctctatgccagacactgttttagggtggaaaatcaaagaagaataagacacagcccctacgctagaggaaaccaaaggtctagctgggaaagtgggtgcataaacaaataattatgataggatgggataaaaatgtacacagacaactctgagggttcagaggtggggccagggaaccccatctggggttgggaatgttacaacaggattctgcagccttgtgtgtttgcttcatgagcagcatttagagttttaagatttttagtattacactagacttcctagggcaaatagcagtcatgtcactttccttttgtttttggtgattccaaagccaccatgctgggaatatactgagaggagaaaggagaattcaaaatagagtcaggagcttgttctgccttcagtgtgctctgtgatttgagtgtgccactgggccttttaattatcaaaaggtgttgatcttgtgaatacacattgctaagtcacctgttggatattaatagcagaagccaagagtttacccaagggagtgatgagatcagaattctattattaaagggtgacattctcttgctgtgttgaaattagactacactgtgattatatcctacagtcctagaaaacaacagcaaccaagctacattcaactgttaaaagtgttattcataatacctcttatagcaagctatacttattccttcctttaaattaagttgcctttttcttataaaagtagcatatgttgattaagtggaagtacagagccaattattgtgttagtttcctattgctgctataacaaattaacacaaatttaatggctttaaataacacaagtttattcttctggagatcagaattctgaattgactttcccaggctgaagtcaaggtgtgggcagggctcattccttttagaggccctagggaaaacctgtttccttgcctttttgttgctgggggctacccacatttctttgtaacctccttccctcatcttcaattttgcttctggcatcatatccccttttcctctaactctgccttctcctgagttttcttttttttttttgttttttgagacggagtcttgctctgtcgcccaggctagagtgcagtggcgcagtctcggctcactgcaagctccacctcccgggttcagccattctcctgcctcagcctcccgagcagctgggactacaggtgcctgccaccatgcctggctaatttttcttgtatttttagtagaaacggggtttcactgtgttagccaggatggtcttgatctcctgacctcatgatccgcccgcctcagcctcccaaaatgctgggattacaggcttgagccttctcctgagttattataaagaccagtctgatcatattgggccaacccaggtaatccaggataatctctccatctcaacgtccttaatttaatgacatcagcaaagtctcttttgccatataaaataaaattcatatgttcaagggattaggatatggagatattggagggggttattcagtcgaccttaactactgtctatgttttggagcatttacttaatattcttctcgaatttatataattcagattattctgtatagatacattgatgttatgcctttgtcatttacccttgtattatttgtccatccgaataagttttttgaaataatactttttgacagctgtataattcttctgtagggatatatgataatttatgaagtcattgcatcacaatttggacgcaatcgttggagcaatcatggttctaagagatagagtccaattcaacctgcttaagcaaagcaaggaagttattggctctggcaatccaatgcactgttaacaaccagactccatgggattcagcagggcttcaggggccactgcaaccatggattctaatagtgccaggacaaacttcatcttcatgtccttttcatgccctctcacatgttatgatctcatccactagagaggcactagctgaccacaagccctttgtttaactaagtcaatccaagccccttaaaaaaaaaagaaagaaagaaaaaccccagtttctttcatcatggcctgaatctaatctcagggagttcaattgcaggtcttggtgagctgggtccttgtccctatcagcaatgcctggcagcttgttagaaatgcggaactcaggctccactcaggacatagtgaatcacagcctgcatcgtaacaatatcccaggcagcttgaatgcccatggatgtttgtgaagcaccgttctagtaattgccttagttctgtctttagatttttgtggatgtggacaaagcctgtgttgactgaccagcaatcaaggtttatagttgtaggagaggaacaggtaagggcggtttagcaagacagagcaaaaacaaatagtttcacagatttttgagaaccatactcataaaaatgatcattgcctctgcacagcagtttcttgcaccatgaggcagctaaatctgaatagccaagacctgcagctgtgtcatctgtaagttgtctgaagcacctcaggaaaatatggtcttgccaagtaaatctggtatctctctggtttaggctctgtccctgcctggttcaccccagagagtcagctgatttgtccttccatgtgtttgcaattaaatgggtggacaagggtgaagccagcacaatctggtatcattttgttgattacctatgaggcttcttttccattctacaaacatcacctgcagggacttacatctgggactgttgtgattcctacctttttgttgttgttgttgttgttgagacagagtcttgctctgttacccaggctggagtgcaatggcacgatcttggctcactgcaacgtctgcctcccgggttcaagcaattctcctgcctcagccgcccaagtagctggaattacaggtgcccgccagaaagcccggctgatttttttttcgtatttttagtagaggcagggtttcaccatgttggccaggctgttcttgaactcctgacctcaggtgatccacctgcctcgacctcccaaagtgctgggattacaggcgtgagccaccgtgtccagccctcccatcctcttaagaagcacgtagttttcacactgttgctagccagggaaacaaccttgagtaacacgtagaggaaacactaagcaaatttgcagaagaatgattttaaaatattcttcagataaaataattggtaacatgtatatgactaggaaatacggaccttggtatcagatatgtcttactgtcacagagtaaaaaagggcatagattcctctatatctgggttctgtggtgctagagaaggatttaaggaacagcgacagtcactctgacatattaacaaaacgttttccaatggcttttcttgtaaaacaaatataagtctcattaccagaagtagaaataacattagaggtacaatgatatgtttcagagaatggaaatcatcgcattttccttctgatatggcttggctctttgtcctcacctaaatctcatctctaattgtaatccccacgtgttgagggagggacctggtaggaggtgattagatcatgggggcggtttccctcatgctgttctcatgatagtgactgagttctcacgagatctgatggtttaaaagtgtttggcagttcacctcattgctcgctgtcttgcctccacgtgaagaaggtccttacttcccctttgccttctgccacaattgtaagtttcctgaggcctctccagccaagcagaactgtgagtcaattaaacctttttctttctacctaaattatccagtctcaggcagttctttatagcagtgtgaaaatggacgactacaccttctaatacaccagataggaggtagagctctagggatcttttggaccataggtggaagggaagtgcggtatggggagcaatgttgggggtatttataaaagggcaacatgagggatctttgtgtggatgggatggaaatgttctgtatcttgactgtactaatacaaatgacctagttgtgatattgtactatatggtatgttactactggaagaaactgcataaagggtgcctggagtattatttctcacaattgcatgtgaatctacaataatctcaaagtaaattgtttaattaaagcattgcgctgaagtagtatctatcttaattactgagggtttttttttttttttttgcagcttcttaaatttttctcccatggctagttcctctcctgcctcctctcaatttcatccctactcaggctgagtgcctcgttctagcaaataaatatggggcaaataaggtatcctccctagcctcaaattcctcatctgcaaaatgggaatgacgggagttctcacttcctagggtttttgtcaagattaaatgagataacgcatgtaaaataattagtccagggcctggtatatagtaaattctagttaaatgttagttatataaccatatcggaacacggtaatcagagtgtctatgtaaaaatgtgcacacatggttacaggggatgggattagaaggagcgttcattttgtttaatgactctacttccaggtgacagggcccgtgtgggtcctaaaaatgctgtgtcctctcggggcaggcttcatgggtgtgtggcttgtgcaggcttacagggtcacatgctgggttttatgttctgctatgtattagggattaatacgacgtgtgtatatatggaagggagtttgttaaggagaattgactcacacaatcacaaggtgaagtcccacgataggctctctgcaagctggggagcaaggaagccagtaggggcttagtctgagttcaaaagccttgaaatcgaggaagctgacattacagccttcagtctgtggctgaaggccagagaacccctggcaaaccactggtgtaagtctaagactcctgccctggtgtctgatgttaagggcaggaagcatccagcatgggagaaagataaaggccagaagactcacaagccagcttattccaccttcttccacctgccttttctagcagcgctagtagccgattggatggtgcccacccacattgagggtgggtctttctctcccagtccactgactcaaatgttaatctcctctggcaacaccctcacagacacacctaaaaacaatactttgcatccttcaatccgatcaagttgacaatattaaccatcacatgccgtcaccacttttcaacaagaggccacacattttttttcttttttctttttggtgctggcccacaattatgtagctggtcctgtctccccttaatcaaagtcagtgtttccccagagagggcaagactgatagtcactagctcctcttcagagtagaggacaatgggacttctccccagtatcccagcagccagggctgttagttcaactcaattagagggagttctgctcgcagagctgttctaccatagccccttctttttgtgcacctcctcattcattcgaagagtctcctcagatcccaccacaataactactctcacatgaaaactttgttggcctgtgagtatatgggtggagggttttccctccaactttgtgggtttgggtgcttttgcttgatcgtttctcattagacagaaaagattttgtggacaggattagagctctgctcagccacagtttaaaaaaaaaaagttggtcttgaagaaacaggaggcttaagacaaaacacacataaaatcactaacctttcactttaatggtctttccaaattgtcaaaaccactgtggtctgtcttgctcacaagaggcattcttggggtttacagacactgagttgagaaggaatttctctgttggatggctgaggatgcagccagtaaaatgatcctgtggagcaatattgcccttggagcagacaagtttgagtcctgtttgtccaggtgcaatgcttgtgtgcaaatctgtccactcagccactctgccataagggtctgtcaagacagtcaggtgagtcctgggctggccggtttagccctggggaggctgcaccttgcacggagctggcgggagccaagaagggggcctggctcctctttgtgaaatgatgtgtctggaataacaaagggaagaaatcacaatgaagggaacccacagcatatgagttcctaccaagctgagaagtgatgaaagtgaaaagaaaacttaagctggagttcaaactgtggctagggttatgacagttaataaatcagtgagtctggaaaatgttgtctcaacaataaaattaggaagttgcaatactgtcattaaactagtgttattggccgggcgtggtggctcacatctgtaatcccagcactttgggaggtcgaggtgggaggatcatttgagctcaggagttcaagaccagcctgggcaacatggtgaaaccccatctataaaaaattagctgggcatggcggtgcatgcctgtggtcccagctacttgggaggctgaggcagggaaatcatttgaacccgggagacggaggttgcagtgaggcgagagtgcgccactgcactccagcctgggcaacagagtgagactgtctcaaaaacaaaaacaaaaaacaaaaaagtagcgttattaaaaaacagtaataattaatttgtgtgtgtctcctctctgcagatgtctttaatttattcatcagtaaggcttgccttctccaggagagaatgtggtatattaaaatggtaaataaaaggggttctgtcatttgctcactgagtagattatttaagatctctgagcctcagtttatccatctataaattggatttagtaataactgtatctataggtggtagttttcaaatattttagcagcaagctaagaaatatctaatattacaatgtaatatgctagatacatacaaccacacttatataactgaaacaaagcttttataaagtagtgtgtcccatagctgaatttgatgcacttatattttttaatgcttctttttccatcacattttatttagaaatactggttgtgacccattaaagtggtttcataacttaatatttcaaaaatgctatggtagattaatctgcccattaaaaaagatattatacataaagtgcttagctcacaaaaaaaggccaataaatatgaacttccttcttcctcctttgggagccaaacttacagctacaatttgtactttgggtttctgtgacatttacatgtgtgatgcttataaattttcataatatagtaaactaaagatattattttgggcttctcagtatcagtgttaaatcgatcagagctgatgacaagcagttagaaacttttgactattcaccaagaaacttatatgatcctgggtcatattcaatctacaatacaccaacaatccaagaagtaaacatttgcaaaggattactacatatgaattgttaaaaactgcaccaggtgcagtggctcacacctacgaggccgaggtgggaggattgtttgaggcaagaagttcgagaccagcctagacaacataggaagaccccatctctacaaaaaagtttttaaaaattaaccaggcatggtggcacctgcctggaggcccagctactgaggcagaaggatcacttgatccctggagattgaggctgcaatgagctatgatcatgccactgctctccagcctgggcaacagcaagaccctatctcaaaaataaatacattaatgaatgaaaattgcatgtatgttctcaaccctggctgcagattagaataacttgggggaacttttaaaatatgatcaatgcctatccattctccagagattctgatccaaatggtctggatatagcctgaacatcaatcagtattgtattatctaaaagagactcaggttaacccagcatatagtcacatgctggactggttgaggaacatcgggttactcagtgctgagattaagaagctgatatgataactaaaactagatataataatatagtgagaaattttcaccattcccagaacctcctgtgcccatcaaacgttgtaccgaaacaatttctgctgaaaatcagttctggcaagttgtttgaatcattgtacgtattcacgagttagaaaaagaaattgcctaggaaatattctcaatgcaaacttcttgctaattctgactggcttgttttctgagttagtgtgaactgtgagatctaactgctcattatcctgtcttcacgggtagcctcgggagggtagagacagtcctgctgtctcaaaatcctgtcttcacaggtggtttcaggaaagtagagacagtcctgctgtctcaaacctggtaacaatggcagctaataataagtcacttccccctctttgtctccatcactttggttcagtcctctgctgtcacaccctgcagattatattgtactcaatctctttccaatctttcttcactcataggctgtgagtcttcagggcactcaccatgttttagacacctttgtgtttccaagacttagtacagggcccaagttgttgcagaggcttaaacatgttttattttattttattttttgtaaagagatgagttcttgctatgttgcccaggctgaactcaaactcctgggcttaaaccatcttctcgccttagcataccaaataactgggactacaggtgcatgccactgcacccagcttgctcaacaaattttattgaatgaataaatgaaggattttggtgctcagagcaggtccctggctctctgggaggacagaactgaagttgccttttaccgtgtcttttgatctgtttcttctactactcagcccttttgctggaaggatgggttttctttatcatgtcaaaaagaagtgggttttttgatcaatattaagacaccataaagaataaaaccctctgccgcagagtccctcagatttcatggtggatttctagttcctgggcagcagtggcactgccagctgcctcctggtttggaagccaacaccacactgcagggaaaccaaatctcctgagaacctaaaatccttcaaaggcagtgctcccaggctggagctggcattgctattccaggcttggggttctggccattgacagtgattatgatttaatacaccacattggtgaagtagcaattcaggaaatattgtttttaaaatcaaccacgaaacttggttgatttgtcttggaagttgaaatcccacattttaaggatggatgagtctgggtggtcctggtaggaaagcaaaggagagaaaaacattacaaacacgaaatgcgtatgtttgatttctctgcttcccacttccaggaacattttaacccttagtagctttttacttctaatacaaactttagtttctttcattttaatttgatttttttttttttttaatgacaggatcttgctctgtcgcttaggctgcagtgcagtggtgtgattatggctcactgcagccttgattttccaggttcaagcaatcctctcacctcagcctcccgagtaggtgggaccacaggggcgtgccaccacacccagctaatttttgtattgtttatacaaatgggattttgccatgttgcccaggctggtcttgaatgcctgagttccagtgatctgcctgtcttggcctcccagagtgttgggattacaggcatgacccattgcacctggccaaaacatttttattttaaaaacttttttattttacttctaatatgatcatcaaagcactataaacatcctcgttttttaattcttaaaatttcccttatccttaaatatctcctcaagaacaccatctctactgagtccagcaatgttaccaggaatttttcatggtctttggtgcatcatctatgtctgtcagggtccaccacactcttctctgtttacagaaatcacattatgccctgtgcacagcaggctctcagggaacacactaagtgttcaatgaggtgaatgggatggaacaactcagccgtttccacagcctgctcaagtgttaaagtgagtgagagtgtatttggcagaggtaccgaggagtctttcaggaaatgaggtcccatctcggggtattttttgcatgagacagcctgtcattctggagctttagtgacataactggacatgtctggcccagtatcacactgacctaataatataagaccacagggtctgctccatcatggatttgttgaagccctccatgccttcatttccttatcctggtgatgagcctaatacccaccccacaggtgttgatgtagtgaacgtgaaagttctgggagcggttgtgaaaataaattctctataaaccctcaactgagtggaatttctgccctttttaggccacacataaaatcacagcttttccaagttcccgttgatgaagaaataggactaaataggcatcctgcaaaaaaaaaaaaaaaaagaagctcttttttcccaaattaaaattgggagttcacttttttttttttttttttttttttttttgagacgaagtctcactctgtcaccaggctggagtgcagtgatgccatctctgctcagtgcaacttctgactccttcattcaagtgattctcttgcctcagctgggattacaggcgcccaccatcacgcccagctaatttttgtatttttagtagagacggggtttcaccatgttggccaggatggtcttgatctcctgacctcgtgatccacctgcctcggcctcccaagtgctgggattacaggcgtgagacactgcgcccggccacatattaatatttttatttatgttgatgacacatgcaagcaatgcacctcttggtctcttgggatctggtttgtttctattggcatcttccagctagacttgatttgcatcaggtgagcgctccctctaacagcaggcttaggttatgctgattggaaaggaaactctggagacctgtgtggtttatgcatttatttgcctgtgcattaatacatttaacaaacattgtgcactcacgttttgccaggctctgtgacaggtgttgggatacagaaacaaaagagactgtctttgactcgtaagagctcacattcctgactgggcgtggcaggagaattgcttgaacccaggaggcgaaggttgtggtgagccgagatcgcgccattgcactccagcctgggcaacaagagcaaaactccatctcaaatatatttctgtgtgtgtgtgtatatatatatatatattatatatatatatatgtgtatatatataatatatatatacgtatatatatattatatatatacgtatatatattatatatatgtatatatatattatatatatatgtatatatatatatattatatatatgtatatatatatttctgtgtgtacatatacatatatatatttctgtgtatatatatacatatatatttctgtgtatatatatttctgtgtatatatatatatttctgtgtgtgtatatatatatatatacacactagtataagggggaagttatgatttggctgttataggcatagaggtgagggcatctaacttcatctggggaatcacagaagacttcctggaagagatgatgtttgagctgagccttaacaattgagtaggggttttctgaatgaaagctacaggaggtggaagctaagggggaggatatggagcaaagaaagggatttccagctgttttccagaaaaaacagcatctgccagtgcaggtgtggttacattctgggagtggacagagatgaaaaggtcagattacaaaggaacatacgtactttaaaaaaggaatttgaacttcaaagatgttggactttatgcaaaggctcagcattgtaaggtttgtgttttagaaagggttttcaatggcaatatggcaaatggatttttgggggatgtggtgggcagtagtattgtcagggagaaaggttaggagtcaagtccagttgtctaaaaggaaatcagtgcttgaactaaaaacagtggtgttgagaacggagaagggatagattcaagagaaacgtaggagatagagtctacagatctatagaatgtgaactgtggcatgagatgaggagcattagaagacgtggaggcctgacatggtggctcaagcctgtaatcctagcacttgggaggctgaggcaggaggatcttttgagaccaggagttcgagaccagcctgaacaacatagcaagacccagtctctacaaaaaataaaaaaaatgaggctggcatggtggctcacacctctggttccagctactcagaaggctgaggcaggaggatagctcatgaggctgcagtgagctatgatcgcaccactgcacatcacctgggcgacagagcaagaccgcatgcctaaaaaaaaaaaaaaaaaaaaaaaattaaggattacattttaggattctaaatcctaattttatgattaaattacttaattcatggtaattcctgagacttggcagtgtttaaaaaaaaaagagtggaattcagagggacttctaggtttctgattttagtgacctaagtggttgtcacatgctgatgctgcagggagcatagaaaatcatcctgggtgttcgtttgctaattttcaggttgccatgtaaataaggcaccactgtccatggtgcagacagcttgttgacttgtacaagtccttttaatctaggaatgcagttttatactttttacatgtataaatgcatgtgtgcatgtgtatgtaaattcgacatatgtactgatctccacttggctaagagatcacccatgtgtttatgactatctctttgctctattttgaatgccatgttaatgcagcagtacagtgctgaggttacgtgcatgggctctggagccagactgcctaggcagaaaccctgtctccatccctcacttgcagagtaacctggcgtgagtaatataactatttcctccctgagtctcctccccctataaagccatcataacaattatacctgtctcatagggaagttgtgaggattaaatcagttaattcacggtaattcacttagaacatggcctgcctggtacatagtaagtgctgtgtaactgttatctcttattatcacagcaagaatgtctccattggaaaaatccttcaagtgtccctgatcctgcttgagtggcatgtttacctgttgctgacctgcagagccctagctctaggccagactctaccctgggggtctgcatgtattacctccttcagttgtcaccacagagctctctggtcctgagtagggcatcatgatcccagtgttaccggtaaagacatagagattggagatgctaagcaacttgcctgaatcacaccactagcaagtagaagaaccaggatccaaacccaggactgccttactctaatgtccctggacataatctgggctgttgctagggcagccagtgcagccagctatttccagcaggacactggtaggaagggcctcattattccaacatcaagagccaccttggttctctgagttcaggagcctactccagcaccgcaaatggtgatgaagtgcaacctaagtggtgtcattcactagttaaaaagaaattgggctttttctttttatctctccagccatccagccaaacacaattaagttcccctacctccttattttcttttaaggatttagatctgcttatagaagccttgaaacaaaagacccaatttaacaggtagcaaaacattgtaaggctggatgcggtggctcacacctgtaatcccagcactttgggaggccgaggcgggcagatcacttgaggtcagaagttcgagaccagcctggccaacaaggtaaaacccatttctaccaaaaaacacaaaaactagccaggcatagtagtgcttggtcccagctacttgggaggctgaggttggaggatcacttgaaccctggaggcaaaggttacagtgagctgagatcttgccacgttggtccagccaaaaaaaaaaaaaattgtagcaatgtgatctggaaaagatcattttaaatggtagttgcctcagctgtgcttaagtagcttttatgtgagtcataaaagctacttggagaatatactttgaatacacattacctgtgtgcccagttcatccatttccacatcattatcttcatgtcttgttggaacttggtaaatatcaggtctcatctttcattttgcctctcaatcaggtttctgtacatgttgctgacagttctgaccagtgagttgccatttttcatgaagctttctctgatgcaaaaagatcatagatcctttgatacaagtgtcaaatattaccagtcacattgtcatttccaattgcaagctgagacagtaagggggaatttaggactaagttattgatgtgggttattgccagggtgctgaagtctgagaactttgtgccatcccaggtcactgtttattagctcagtgcagactcatatttcttaggaactatttcagccaaaaaagtcttccacaaacagctttcatgaggttgtggaaattgaatttcctaagctttgcatctgctgctaaaaacaaatgcattttcccactctctgagaaacaccactcttaccagtctctcatgttatactctcctggagaaagaaatctggctttcacccaagagagataaccactttatctcagctggatatttgaacatctacacattgaaagcagataaaatatataaactgggtcaaactagcaacaatgcattgcttttcttaaggattcactctcaatattctttatattgaaaccaccattgtacctttaagatgatgtacaaaacctaatttacacaaaagcttttcaagagcttatattttgagtcaagcactgttgtattagtctgttttcacactgctataaagaaacacccgagactgggtaatttatcaaagaaagaggtttaattgactcacagttccacatggctgaggaggcctcaggaaacttacaatcatggcaaaaggcaaaaggaaagcaaggatcttcttacatggcagcaggatagagaagagtgaggagtgaagggggaagagccccttataaaaccaacagatctcgtgagaactcattcactatcatgagaacagcatgggggaaactgcccccatgatccaatcacctcccactaggtctctccctagacacgtggggattatgaggatagcaattcaagatgagatttgggtagggacacaactaaaccatatccacaattgtcagtattgtttcgaaatccttggttagcagggcttgagtacaaatctcaaaaaaggaaaaagataaaccctatatcaatcatttttaaatgtggtcttttggcactataggcattacaagaaaatgagaaatttaccaaattatcggtttgggaggaattcattcttatggatgcaggtgtggttcccatatttcatttctgtacacattgatatatggacggtgctgtctcctgagtctgaaggtgaattggaggcttcatacaaatattcaccaagttgcagacaaatggaaagaacagagggaggtgtgtccctttgtcttgttttcttttaaagcttccattttcctgggtgcttattatggggtgaatgatttgcaaagtgctttatagatattatctcatttcacctttgcatgaaacttgtgaactaaaactaattgtgttcatcttgcccatgagaaaactcaggctctaggaggtgaaatcatttgtccagggtcacacaggagtttttgattcaaaacaggcttttgcagagtcatagctaacactcactgggctcttgcagtgaactcagacgtggttctaaatactttaccagcattaaattcatttaatccttacaacagctctatgtgataggttcttacctccttctcattccacagatgaggaaatgaaggcatcaagaggttaaatgacttgcctaagggcacaaggttaaaaaatgagagacatgggataaaaaaccttgttcctctggctccgcaatgttctctcctaaccattgtgtctagaggctctctctaaaattctgcctcatgatttttccacttccactgcattgtctaattctctttcctacttcatttttactgtgacacttctcatagctgacatactttatacttgcttgatgatgtttgtttgtttctttttgtgtgtctcctcacactagattgtaagctacaagagggcagagatctgtctttcttgtttactgatgttttcttggaatagttatacttcctggcacatctatgaactatggcacatttatgataaatgtaggatggcacctggaacatagcaggcagtgaaaagatcaatgggagaatgatggaatcatgggcatatctgtaagcttattagaactgacagctactcaggatccatcctgcttgcagtggtgattttgaatccaatttagtagaatggtaggtatataaaacaaattgctgtgggtcaaagagcggatgagaagtcaagaagtaattcagatgaagggaagaaagatataggatgtagctggaagaggcgtctgtggtgggggaatatatctatgggtgaaaaggtttacagcctaagaggaaggagcaagtggagaggaagatctgagtggaggtgactgatgtcttagcaaagagagcgaggaattggcctaagagctgtagtggaagggccaaccttgcaacaaaggagagctgctttctgaaacagggcaaagggaggcaatgattgacaattatgaagagagatctgaaggaaagaaattgagagagctcctattgcatgcccttgctcttcccagggtaatagcaaggtgaagccctctacagatgatggtgaggaaaattctgctttaaaaaaatgttgtcagataaaatgatggtttgctaggactgaaacagggaacaggggactgaacttcacctcatttaagacataaatttcttataggcaataagcaacagtgacaggaaatcaagaccaggctgcaattaatgtgaaattgctctctgtgaaactgttagtaaaaggagattgtggatgatgaaggggcactggcttaagctgttttcatggactccactcgtgtagaaacagagcaattgcttcatgtcttagtgttcccacaggatcaaccaaagattcatgccagtggacaaaacagatagctttcctcccaaagtgatgtggtcactggatttctcagtctgaggggacaccagtgattcctggttactggtggcagtcatttgctccacttagatctctggctacattcgtctagtcaatgtgagacctgcttccagcttattccttgaaacttgcttatgcccctttctttctcttcccaatatcctccaaggcatgaatcttccctcttttttcctttaatgataattattttcattctccagaaatcctcctactcaggaactcactcttcgtattggttatctgttgctgagtaacaaaattatccctagactcagtggtttaagacaacaaacatttattatctgtgctgtgtcaggagtttgagagcaggcttgttggtgcctctggctcatgggtactcataatactgcaatcagggttttggcttgagctaccatctcctctgaagactccaatggggaaaatcaagttccaagttaggcctcgcccatatggaagctcacagcttagtagctggcttcccttagagtgagcaagtgaaggcgagcaaaatgaaagtcagggtatttttgtaaccaaatctcggaagtgacatctcatcacttttgccatgttctactcattcgaagcaagtcccagttccagcccacgctcaagtggagggaaatgtatgaatgtcaggaggggaaaatcttgaggaccaccttagaaactgcctaccgtattcacattcgttgcttcccccatcctatgctagcaatttattttcctgaaagtagtgagtaaaaggaaccatgcccagataccttcttgaacccaattgccatagtcattctgtatagatgggatggactctcccctcccttgttcccaaatttgtttgacatgctgaaactgatgccactacacatgcaccaagaggataatgagctggctcccaagttggtccaaaaacagcctgagagagcaaggaaagaagactggcatagggttttatgttgattaggacctggggctcacaggacggtttctgtgtggggcctggggcttgtgttcttgcctgttagagccaatgaagatcatgtataggctttctcatcaacttttccagatgtggggctaaaagggaaagggaagtcatggggcctgaaagctgttaacagtcaaacatcaaaaatggagtcagaccctacattaaattattgaacttgaaatttgatggataaaatcggatgttgagattctgaagtctgactctgcagtggaagcacatggctgaaaagacttccacaccctcagggagaagtgactttaaataaatgtggctgatctcacttacatgtggaatctaaacaaacaaactgaacctagagaagcagagagtagaatgttggttaccaggggctggagagagagggggactggggagatattggtcaaggaataagaaatttcagctaggaggaataagttcacctgttggtgaacattatgggatttgttccaatttagggccattgttaattaaccttctatgtaaaagtctacataggacatatgatttatttttccattgggtaaatacttaggagtggaaagacttagacatatgtcaagtatctatctacctttttaagaaattgctaaactgttttctaaaatgtggttgtaccattttgcattcccatcaatggtgaatagaatttccacttgctgcatatctttaccaactattaaatatggtaaaactttgaattttagccattttacaagttacatgttgtggcatttcattgtagttttaatttgcccttccctaatgactaatgtggaacaatttttttatggccataatttgctctccacatcctttgtctggtggatttgaatttggtgtctatttgaacttttgtccatttttattttcattgggttgtttgtcttattattgagttgtatgtgttctttatacattctagatacaagtccattgctgtatatataaagtatattctcctagtctatggtttgccttttcattttaacagtgattctttttttttttttttttttgtaatatcaacttttactttagattcaagaggtccatgttgaggttggttacatggatatattgtatgatgctgaggtgtggggtatgaatgatgccctcactcagacagtgagcacagtgcccaacaggtagtttttcagcacttggctccttccctttctcccctccctgttagtcctcagtgtctattgttcccattttcatgtccatgcttgcccatgctagctcccacttagaagtgagaacatgcagtattttattttcttaacagtgactcttgaagagcaaaagtttatgatatcagtgaagtccaattgttgatattttttcttttagagtttatgctttttgtattcaaggaatctttgccaaacccaaggtctttataactttctcctttgttttcttcttgagttgtacagttttagcttgtatacttagatctacgatccattttaagttagtttttgtgtatggtgtgaggtaatagttaagattcattttttctacatgtatagccaattactccagcaccatttattaaaaagagtattctttcctccactgaactgttctggtacctttgtcaaaaatcagttgaccatttatgtcttggtctatttctggactcactattctatcgtcttgatttatttatctctcctgatgccaaaaatgaaattgcattgactattatgaccttataataaaccttgaaaccaaatagtataactccttcaactttggtattctttttcaagttgtttacaggttgagcattcctaaaatgaagattcaatattcaaaatgctccaaaaatctgaaactttttgagcaacaacatgatgccacatcagtgactgaatagtgacacctttgctttctaatggttcaatgcacacaaactttgcttcatgcacaaaattatttaaaatattgtataaaattaccttcatgctatgtgtataaggtatatgtgaaacataaatgaattttgtgtttaagacttgagtgccatccccacgatattccattctgttatgcaaatatccccaaatctgaaaatatccaaacttcaaaacatttctggacccaagcattttgaataagggatactcaacttatacctggttctttgcatttccatagcttgctgggcttttgactgagattccattaaacctatagacctcccagcactttgggaggcaaggcaggcggatcaattacggtcaggaatttgagaccagcctagccaacatagtgaaaccctgtctctactaaaaatacaaaaattagccaggcgtggtgacaggtgcctgtaatcccagctactcgggaggctgaggcaggagaatcccttgaacccgggaggcggaggttgcagtgaaccaagattgcgccactacactccagcctgggcgacaaagtgagacggtgtctcaacaataataataataataataataaaataaaattaaaaaataaaataaacctgtagatcagcttggagatagtgacattttaacagtgagaagttctttgtcttgcatccttgcctaaagcatttaaaaatacatgtcctagaattttgtacttaaatagtcaatgttgcctctgaatatagctgtagggtttttgtagatgccctttactaggctgagaaagtttgctgataattttgatcagaagtggattttttgtcaaataaatactttttatgcatctattgagacaatcatatgctttttggaattttagtctgttaaaatggtaaacgacattgcttaattttcaatatttaaacaaccttgaattcctgggataaaccccacttggtaactgtgtattatacctttttatattgttggattcaatttgctaaaattttgttgagaatttttgcatctatgtttatgagagttattggtgcgtagtttgcttttttgttaatgtttcctctatgatttttctcttgccgatttcactttttaaaattttatctttattatttcctttcctatgcttacgttgggtttaattggctcgtctcttcctagtttctaaaagtgatcagacatatatgcttcagtactataaatgctgttctatgtacttctttagctgaatttcatagattttaatagtttgtgtttttatttttaccagtttaaaacaatttataattttccttttgatttcttctttgatccttggattatttaaaggtctgttatttagctttaggagttttcagcacatctttttgttaatttttaatttcatttaattgtgattagaggatatatttcgtttgcttttaacccttttaatttttttgaatcttgttttgtggcccagtatatggtctgtcctgttaaatgtttcatgtacatttgtaaagaaagtgtattctgctgttgttggtaagagagctttgtaaatgccatttaagtcaagctgattaatagtcttgttcaggttgttcatatccttactgattgtctactttttctcacaatttttataaaaggggcaatgaaatctccaactctaattataaatttgcctatttctttttgcttttttctctctctctcttttttttttttgtattagagtctcattctgtcatccaggctggagtgcagtggtgtgattacagctcactgcaacctctgcctcacaggttcaagtgattctcctgcctcagcctcctgagtagctgggactacaggtgcccaccaccacacccggctaatttttgtatttttagtagagacggaatttcaccaggttgctcaggctggtctcgaactcctggcctcaagtgatctgcctgccttggtctcccaaagtgctgggattacaggtgtgatccactgcactggcctgaatttgcctatttctttttgagctctatcagatttacttcttatatttttaagttctgttattaggtgcataaatatttaggattttatatcttcttgatgaattgacccctttatcattatgaaatgatcgtggtaatatccctggtaatattgtttgctcttaaatctacattgtctgctactaatatcgtcactccagttttcttttttttgtgagatggagttttgctcttgttgcccaggctggagtgcaaatggcgcgatctcggctcactgcaacctccacctcctgggttcaagtgattctcctgccttagcctcctgagtagctgggattacaggcgtgcaccaccacgcccagctaattttgttttactagagacggggtttctccacgttggtcaagctggtctcgcactcccgacctcaggtgatccacccgcctcggcctaccaaagtgctgggattacaggcgtgagccactgcacctggccccagttttcttttagtgtttgcatgttatgtctctttcctttcttttatttttaatctacttgtatctttatagtaaaaatggacttctgtaggttgcaagaaatttggcttgcagtgtttcttgttggaattctcttgttatttttatcttgatttctttctgcatagtctgtctttattctttggctgcttgtaagattttttatcagtcaatgatttttaacagtttactatgatgtaccttagtgtaggattcttcatgtttattgtactgggggcttgttagcttctttataatttttttgtcaaatttggggaaattttgaccattattttcttaaatattttccatccccctccacatttttcagggactctatttatacagtaggctgcctgaattttccccagagctcaccgtgctgtgttcaacttttaaaaatcttttttctctgtgtgtttcattttggatagtttctatagctatgtcttcaagttcactaattttttttgcaatgtataatagtctgttaatgccatctagcacatttttaatttcaatcattgtatttttttcattttcagaagtttaattttgatcttttaaaaaagattttacaggatggctaccaaagtaaattaaaatttaaaaaaaatatatatatatatacacaaagattttacttgtctttaacttgattgaacttaacatgttcaatctttaccttcttcaacatatggaatatagttataataaccgttttattatctttgtccactaattctataatctatgtcatttctggcacattatgtattgcatcttcctccttttaggcatgtctaggatttttgtgactcacagaacaaaacctgtgaatttaaccttgttggatattttcatattcctatattcttgagcttcttttatggggtgtagttacattccttagaaaccatttgcttctttcaagtcttgcttttgagctttgttaggcagatgcagaacaatctttagcctcagactaacttttccctactactgaggcaatatcttcttttttcttttttgggacggagtcttgctctatcgcccaagctggagtgcagtggtgtgatctcagcttactgtaacctccacctcttgggttcgagcaattctcctgctgaggcaataatcttctgaggactctacccaatctcccctgattacaagattcaccactatggatgatggaatacaaattcttcccatgttcgtgtgatctgttggtattgaccccctgttctctttgtgtgatgctttcccaaggcttgggcagcttgctcacatgcatgcactgattagtattcagctgaagacacaaggtggaccctcttcaaaaagctgaagttttttctttttacgcttctcttcttgaaggtgaccctctgaattctagttgtcttgaccttgttggactcccagcttcatcccctcaactcaggaatactgtccagctctattttggtttctcctttcttcactgcaacctggaagttgtctctaggtggtaagcttgggaaatcagggggctcatctcttttctttctcttgggcactgctgtcctaagctacctgatgatcaatgtctgaaaaccactgtatcatatgttttgtttgtttgttagctttgtataggaggataaacccaatccctgtgctccatattgactgaaagaaggtatctctcagagatgttttaaaatgtgtatttctctattatgtgtgagattaagaacccggtattatatttaagggctatttttatttcttttgcctttctttatgttctttgtttttccctttttgtctcattgaattgttggtcattttcttcttcatttctagaagctcataatatattatagagattagttcccttttttttgggtaaattttcccgtctctaatttgtgtttttactttgcttatgtaatttctaatttatgtacattgtttccatttttatgtactcaaatttgctaatattttcttttattgaacttgggtttttgtagccaagattttatatttgacctttattgaaatagtacagtattactctaagtagattgtgatatgttaaagatgcatattgtcctgtatgaggtgtaattctttgtttgttgagaatatgtttgatttttaccaataggctaaaattatttggaataaagtctagtgaataaggtgagacaacaaattgagtaatgataattttgagtaaatcacgaagttttttttatagttaagagactgattttaatatcaaatgcatacatttgttctgaagttggttccaaagtggaattttattttattttatttattttatttttttgagacaggatctccttctgtcgcccaggctagagtgcagtggtgtgatcttggctcaccacagcctccgcctcccaggttcaagtggttctcgtgcctcagcctcctgagtagctgggattacaggcacccaccaccacgtctggctaatttttttttttttttgtatttttagtagagatggggtttcaccattggctaggctggtctcgaactcctggcctcaagtcatctgcgagccttggcctcccaaagtgctgggattataggcatgagccactgcgcccagcctaaagtggaattttagaaatgtacaattggataataggtttaaacattccttccctcctgttattcctcttttccctttcccacatttaagcaggtggtctgtcctatacttagttgccttggaggacatatgtgcagagctatcatggggagattgagggctccggagtggaatggctgtatgatatctgtatgaagaaaggcgctaggcagacataaagaaaaatgtctgtgtcccaagaaacgcagaaccattgcactgaaagtagctctaagagaaggacaggggacatcacaatggtaccctgtatgcacaatcagcatgtaggcccttcctgaatactgttagactggggaagaccctggaattatgacaaattcctatagctggtggggaaagacaccaaaactgaccggcatgaggtttctaattagcttgattgtatggaggcttgaacttgaaattaagtcagtttatagaaaataaagacatcttaatatttagacgagatcccccctttacaaatattttgacaagtggttaacaaatttgttgctctgcaaagtaagcaatttgaagagttacatcatttgcctctctgttgggaaaagcagtcaactgaattagtttccattaccttataataaggcttttcatgtgaagcccacagactccagccaggtaaggtgactcacacctgtaatctcaacattttgggaggctgaggcagagggattgcttgaggccaggagtttcagaccagcttgggcaacttagtgaaaccctatctctacaaaattttttttcttttttaaattagctggatgtggtggtgtgtgcctgtagtcccagctactcaggaggttaaggcaggaggattgcttgagccccgtagcttgaagttacagtgagctaggatcactccactgcactccagcctgggcatcagagtgagaccctgtctctaagaaaaaacaaacaaacaaaactgaagtccacagactcctaagggatctttgaacttgaaagcaaaaagattgcatcttgaccaacttcaatctgaaatgtagcacttccttcaattataaatgtcgacaacaaatcacaagagtattaataatacctgtgactttatcaacaatatgaaagcatacacatttttatatcacagtacaattactgcagacatatgcaagtatcatttattttaattactattcattgctacttcaaaattatggtagcttttaggcttagtaccagttattgttatttaattcattaatatgaagcactattacaattttatcacaaacacatttttattttgttttgttttttgagacagtctttcttgctctgtcacccaggatgaagtgcagtggtgtgatcttggctcactacaatctctgcctgtctggctcaagcaattctcccgcctcagcctcctgagtagctggaattacaggcacgcacaactgtgccaggctaatttttgtattttttttgtagagatcgggtttcaccatgttggccaggctggccttgaactcctggcctcaagtgatctgcccgcctcagcctcccaaagtgctgggattacacgcgtgagccaccacacccagccacaaatatgtttttaaaatcttttggcaactatatttcagtataatgagttttctttgtaatcagatattttattttgtgcatatataaacattattctgacaagaattggctttgggagatagctgaaaggataaaatagactaggagcccttattttagttatgcgtcgtataattcctagctggagtcacctcaaaaagagaagaggcagcaaaaagcagttcctagcttttcatttccagctcctccccagctggaaatttgaggatgtaacctaactctgagagagtccgaccttctgcactcactgcaggctcagtacactgtaggaacccggcagtttatacatcggatgtaatagcttccaccaggagcagggctcaccaggtttttggggctgaaacttctctgcaagccttagctgatgacagatttccctctcttctttccttgtgagctggtgccaagatgactttccacatcaatggaagagctttaaatctgacattctgagcttgcggcctcctttcatttaatcagcaccaatttcatcctctgtcttggaatccattgcattcagggcacagggcctgtgtcatctcacttccctctaacgctgcctctgccctccctatactccttctcctctgtccacactccctccagcagtgtcagagatgatgccacgatactggaggattccagcatccaagccttgcaggcccctgctgagacaagctatcagcttgcactatttgacaaaaagagagcagaaacaaaattgagccaaaagcaaaggccatgtggagttacatctctgatcttgtcattctttgaccacaaaacttgctgacccagaactctctttttctaagattaactcaatgacaaaacttttcagtctcttttacctgaaaacgtttttactgcacacatctcattttctagcttaactgtagtaatgaaaatgaacattttacagtttataaagtgcttcctttttttgttgttgttgatcagagcgtagttttaattgtatttttgatacacttgtgaaatattttatagaaataaaaatttttacttaggagcaaaagaagtgtgttatcaatcccaaggtaactctctttaaatgtggacatataaaattccaactgtatgtagaagggcctctggttaaatctaagttgtaagaaggcatactaattaacagaacagatgtaaaaataatgaaattctgccatttcagcaacatggatgagcctggagaacattatgttaaaaataagccaggcaccaaaagacaagtactgcatgttctcactcatgtgggaactaagaaatttgatctcacgcaggtctagagagtataatgatggctacccgaggctgggaaggatgtgtgtctgcggagggctgggatgggggataaagagagattggctaatggctacaaacatacagttagctagaaggaataagttctaatgatagataggacagtagggtgactatagttaacaacaatgtattgtgtatttcaaaagggatagaaaagaatatttgggatgttaccaacacaaagaaataataagtgtttgaggtggtggtacatatcctaaataccctggtttgatcattacccattatatgcatgtatccatatatcatgtgtaccccatatacaggtactactattatcatatattaatttttaatagccactttggtatggtctaagagtagaggatcagtgttgagggaatgggcaaaatgtatcattgtaccatgcttgtcacttagatcaccctccagcctggcccctgaaatgcatacctgaatgatagggagatatgctgaaagagcgttccattaaaatgcctgtcacactcaaggatggcaaatttctatacttgagggtctgtggaccctcatgagcatattaccagccagtggtttctgcagcaacaggaaaccacacctgggcaaagaccagcaagcttcatcagcaatggccattccttagaataggcacagcagggggaccagctttacaggagcaggggcccctttgcagcaatcttcacctcagtaagtggagctcaaggaaaatgaagggtgctgcatggaacccgagagtgccgagttcattgagtacacatgaggttcactttgggaatcccatacagagctgaaagagttatgagcatgataaagtgctttcttaggaatgatttcatttgattcttagagcaattgtgtacttgcttgcatttcacaaatgagatatatgagcccagaagggttcaaggctagctctataaatgcactagaatgaagagctaacctaggattcctgcctccagaggcaatgctagttccacggccctgtacttcctgctataggaaaaggaaaatgtgctgacacatgagacctcagtttgctggcttgtctgctctttgtgttgtgcacattggttttgtttcattcaaacaatgttttataagaattcgtatgagtttccaacatttaaaaatttgtaaatttcacatcaaaatctataatcctggccaagagcagtggctcacgcctgtaatcccagcactttggtaggccgaggcaggtggatcacctgaggtcaagagttcaagaccagcctgaccaacatggtgaaaccccttctctactaaaaatacaaaattagctgggcgtggtgacgcatgcctttaatcccagctacttgggaggctgaggcaggcgaatcgcttgaaccccggaggcagaggttgcattgagcccagatagctccatagcactccagcctgggcaacaagagtgaaactctgtctcaaaaaaagaacaaaaaaatgacaaaccaaaatctatattcctgatcttttcccccttcaaatgaattaaaagatatggccatataggacccacattaccccaaggcaaccattagcttgatctgagtagtggtgctccttttagatgggatgtgaattttccagatactgtggagtacatcactaactatcatctcaatattacgactatcagttacgaagacatttattattgtctttgtgctgttgtttttcatatagtggatttaaaaaaggaaggaaaatagttctgaaactcacttccatctcaaaagtggagaaataaaatatgaacctagataactttttgtttatttttagactgaattgcctgggtccattgtaatcatttgggaagctttgaaaaaatacagatctctgggctacacaacagacccattgaatcagaatctgcaggagtgggccctaggaatctgtaatttttaaaactccccagattattcttattgggaaaccactgatttaactcttatgatccctttttttgggatatactctgatggaaaagagatgccactttctctgaggctcttttaacaaccctgtgctaggaaacccaagtacgccagaaactgatggttagctgaaggcagccaggtggaaacaacccatttggagtttgtaatacatggaacatcagttgagtcactggtttggcctataaggtcaccaacaaaaaaggcatcaggagatcacatcagcgccgattcccaccccttggctaatcacagaacaatatcctgattcacgctgaaaggaactgctgtggtttgaatgtgttttccaaaattcatgtgttggaaacaatccttaatgcagtggtgttgggaggggcctaatgggaggtgtttaggtcatgagggctctgctctcatgaatggattaatgccaattataaaagggcttctgagagtgagtttgaccccttctaccccatgccatgtgaggacacagtatatttcccttccagaggatgacagcaacaagagtccttcttgaaacccaagattgaaccttccagtgcctggatcttggacttcccagcctccggaactgagataaataaatttctcttctttgtaaattacccagtctgtggtattctgttagagtagcaccagatggactaagacagagacctaaaatcattcagcatttctgagaagttacttcccttccctgtctccagcttctaaatatgaaaaatattaataaaagtgtaagaagaaacagagactaaatcagggcttgaacactggtttcctaagtcctaaacatgattcttccaatatggacttcatttcatagaactggactttttctctgagaatttttttttaaaccaaatcaggatggcctaggttggatataaacacatataccttaaggcaaaaatgaaaaattggcactttcttgtaatttatttgctaccagttttcttacaccaaaaacaaatttgttataatgttgaataccctgttgtctgggccaactatttaagggaatcagagacgtgttttctttcaggctttttagaacaataataatggtagtagtagttgtagataccttttattgatcactaattctgtggcaagaactcctctcttcactttttatacattatcttattcactctttacaacaaccctctgcagtaagtatttgcttccatattttacatataaggagttggaattgaagctctgaaagtaactgcttactatttattgggcagctacatggcacagagtatgtaagtggtgaagtttaaaatttgaatctcatcttctgattctcaaacctatgggaccgctgtttctcagggctctgttttgtctttccctttggtcctatgctggcctccattctgcctttggttctaataacccttcttttcttttctattttgttgttgttgttgttgttgttgagacagagtctcgcaccattgcccaggctggagtgcagtggcacaatctcgcctcactgcaacctctgcctcctgggttcaagcgattcttctgcttcagcctcctgagtagctgagactacaggcatgcaccaccatgcctggctaatttttatattatttgtagacttttcaccatattggccaggctggtctcaaactccttacctcaagtgatcctcctgcctcggctttccagagtgctgggatgacagatgttagccactgtgcctggccctaataacatttcttaatattaatttctctactttatttgataaatatcctgtccagaacaggtctccagaggctggagccagtcagtgcgtgggtagggtgcacagggcgggtggagggtggaacaggaagggctaagctctggatgccagggcacctccaggaacagccacagggaggctgctgctctgaggcaggggagctggacacatctccacaatgtcaggatttacctcttgaggacaggtgagacagggtcatcacatcataaatctagtgggtcacaagtcaagcaacatttccatataactcagaaacagaccatagtctgagtgaattgagtgaagggataaaggtaggaaatacgaaaatataattaaaattatcagtacatttcgaagttactttttaaagcatttccacatatataatgttattggatgctcaattaaatccagtagcatagcagagattctgtacttagagcgggtcagatactgttgacagctaccgtgagtcatccttcctttagcctctcaggagccctttcatctccaatcaaaggactgcaaacaaaccacacagatgctaggccaattcctgaacatagttcagtggaatacttacattatgtgtgcatcattatagaaatggtttctgggtgagaccaagagtgttacttttgaaaaacctggggtggcccttgggggatgaatgtgagggtgttgagatcttgggagaccttgggagaccctggcaaacaaatgtaaaagttgcagggaaaaaaagcgttaaggtggtatgagaaaacaaggtagggagctgaaaaggatttagttttatgccaaaggaacagaatgttggaacataactaccctagatcacacgttacaatatgatcctttgggaaagctgcacataatctggcttctgtatgtgaggataagcctatatcattttaatggaattttgatagaataccaaaatttaaaagtaacagggctgtgcttccttcaagaagtaattctcttcacaacccatttttcatttcaatgtgcagtggggtggctcactcattgctctttctcttttctttttcatgaccatcctaagtgtattttttttcccaaaaaacaaccactgacaaccccagagccattgttccgagctcttacttctgtgagtgtttcaggtaatactgttcttagcattccatgtcatctttcttatcctttcatttactttcttggctgccaaaagtctcccatttatctgtctcccctctgtgctgtctgagaggtaatttttcatcctgtctgtttccttatcccaatggtccattcatttccttcaggctgcttttccttgccctccatgcccccttcatgacagcactttctctagtgaagttttaaagcattcaggagctgacggctgaagacggtgattgggttggaatgagaggatgagctgatttaatagctattacagggtttcaaatcagtcagggctcttggctgcacgtgatgaaaactcagctcaagctggcttagggagaagggagtgtgttgggtcactcatcagaaaagggtattttggtaaagcagaatggaaggaattactgtaggaaccaggacctcttaaaccagaaccagaattcaatgcccctgggtcactgcctccaatttctcctccctgttttgctgatttgttccactctgcagacaggatttctctatatgctgggaaatatggcggctgacttttagctccagattcataccctccagcagacagagggttccctctaccccaccccaacctatcactcccagggaaagcatgtgattggttctgcctggtcatgtgttctcttcctcgaccagcctctgaggcttagccagacccgagtcaggaggtgggatggaaaggattaggataaagcaccgtgactgacaacctcactagaatcactgtatggagacaagtggttcttcaaaggaaaggatgctagggagacaaaaaacaatgcataaaccctgcagaattaaaacaatgcattttcaaataatttgttttcctgcaacagtgtacagggaagaagtttttttttttttttttctggtgttaccctgaattattcaaattttaaaaattgctttcaggagaattatagtacagagggctcccaaatagtttaaaacaacaacaacaacatcatgttagattattttttcaaatgtccacaataataatccccttccccgaatccacactgcttgagtaccaccctctcatactgagtctgggcttagaaatttgatttgtggtcaggtacggtggcccacacatgtaatcccagcactttaggaggctcaggtgggcagatcacttgaggtcaggagtttgagaccagcctggccaacatggctctactaaagatataaaaattagccgggcgtggtggtacgcgcctgtaatcccagctactcaggaggctgaggcaggagaatcacttgaacctgggaggcggaggttgcagcgagccaagatcttgccactgccctccagcctgggcaacagagcgagactccatctcaaaaaaaaaaattgatttgctttggctatttaggctatttggacaataacaaacatgataaaaagctgagctttgaaccacgtttgtgcattggggcttgttctcacttgctgctcttgaaaaccctcttaagcctgggttagcctgctagattgtatgtggcacattgtctagttatgtccatcgtccttgaacacagccaccgaataccagacacgtgagggagactatggaccaccagctgaccacaaatacaagagtgagtgcctgaatgtttccttaaagcacgtagcaagttgtctgctaaatttaaggaggccgagggagggagtgtgagcagatttggggagagtcttttaaattaatcattaaaagtacaggcactggtgaaggaattgaccagtagtatcaattagtgctgaaggtagaaaccaatctataattggttagcgtaatcctgtgtgtgtgagacaatgagagggtttctcccatcatcattgatcatgaagttttaccccacatcttaggaaagcatacagggatagaaaaggacaatcagactacaggatcccctgctggttgaaatttgtacaagcatctatttgatgccaaagataaaatgatgctacacaagagtgcgtgctcacctacctaaacacccattgccatctttgccagatgttgtggtaaggaagaacttaattcagctgaacagaacctaggagaaaaatgtgagaatgaactccccataaaggggcagtgctctcaagaacttgggaacaggggacttcaaatggagctgttctttgagagtcaaattaacaatcagcacataatggacacaatgtaactctacagaagatagagaatggttccttaaccaaagtaagcttcaactatcaccaggttgatgataacaatatgtttgaagaaaacaaatagatcaatttttcaggggaattacttcattcctgaaagataacattggcagtggaaaatcagtggccaaacagactggaatactttggtcactatgacaggtacatctgcattctaaaatgatgccattaaaatatttagctcatcagatactgtccctgttcaaatccatgctcaccaggcaatattctacacatagtttgctatatgtataagctgtagaataattatttatctaaaacaggtatcaaaaatcttctatgctttagggatttttgtttaggtcttgaagatacaggggtgaattaataaaacaaaacccccagccctcatgaagtttacatttatcatttattctaacggagatccatgcatgtacgggcacgcacacacacatgcacacacacacacacacacacgcacgcacacacactacatagtactttaattgtgggccatggagaaaactaaagcagaggagaggtattggaattgctaggggtgtttccatttttgttatgttggtcaggcaaaccctctttgagaagatcaatttaaacaaagacttgaagaaggcgaggaaatgagccatgtagccatctgagggaagaccgttctgggcaaaggaagtagccagtagaaatatgttgaagtgggatgggtttggcttgttctagacataacaaggaggcttgttctagacataacaaggagtggagtgagcaggggggatagtggtagaaaatgcgatcagagagataatggcatggggcagggggaaaaggaattactataggaaccaggacctacagaagttgcatgggaccttattgtccattgtaatgactgtcgtttactccgagagatgggaagccatcgggaggttttgaacagagggatgacgtgatctgacaaacataatcactctgacttctgtgttgggaagagtttgagggaggggagtatgctaatggaaaggaaccccagttgggaggctgctgcaatgatctagggaaagagaggatggtgatttgaacttggatagtagcaataaaggtggtaaaaagtggtcaagttctagctattttttgaagctagagcagtgggatttgtcggagggcatgaagtggtgcgtgtgagagaaactgatgagtcaagggctattccaaggttgtgggtctgagcaactgataggacagttcgactaattatgatggtgaaggagcagaagagctcatttgtgggtgaagatgaggaggtcagctctggagatggtaaatttgagatgtctgttagatatcccagggaagatatcaatcagtcagccaagagttcaagagaaaagtcacagctggagggaaacatcaagttaaaagtcatcagcatgtagatggtatttaaagtcctgagagtggaagaaattactatgggaatgtaaagacggaaaagagaagtcatggactaagccttggggtatttcagtattaagaactgggagatgaagaggaatcaacaaaggaatttaagaaggaatttaagaataagcttccagtgaagcaggaaaaacaaacatcaaagagattaagagtgagatattgcagaagccaggtcaagaattagtctcggggatgaactagtgatcaattgcattaactgtgagaatgtgctgattagtcaggccaacaaaatcattgtgagccatgtgacaactatatttcttattgtaaattaataacttgaatttattcatttatgttttagagacagagtcttgctctgtcttccaggctggagtgcattggcatcattatggctcactgcagccttaaactccctggctcaagcaattctcctacctcagccttccaagtagctgggacacaggcgtgtgccacctggcctggccttttttttttttttttttttttttttttttttttttttttttttttgtagagaagggatcccactatgttttccgggctggtcttgaacttctgggctcaagtgaccctcccgcctcagcctcccaaagtgctgtgatttacaggtatgagccgttgtgcccaccctcaacatgtcttaaatactgtcaaggatcaaaagacaaactaaaatgtgtcccaggccactagacttagtgttctgcattttgggatggacaaagattgagagcaaacagaatctcaagccgtttctccccttcctggctactcacctagaagcccaggtaatagacagcctttctcttgcttccagaaaggccctatttttctgcactctgtggagggaaacagctcagcaagcttgttcaccccctgaaccatcacccatactgtccctttaaaccagaactctgcttgccactctcctttcctaactcttgggcatccttcaaggctcagtatttgtcacttcgtccagaaatgtttcctgactccccaatccgagtccctaatacctgctgcatagcccaatccggcatctataaaattgtttcaattgcattcttattcatctgtgtctcctaagacactgtgatagggcaggaatggtgtcttggatatcactgatctccagtcccagtcaataaattggatttctgatttaagtctcctatgatctggatactccaagttggagcattcagagcaaagaatctgcttggagtttccttagccaattgggtaagccccaggctggtgcagtggctcacgcctgtaatctcagcactttgggctgctgagatgggagatttgcttgagcccaggaagttgaggctacagtgagccatgattgcaccactgcgctatagcctggatgacagagtgagaccctgtctgaaggaaaaaaaaaaaaaaaaagcaaattgggcaagccttagggtctgaaccatggtaaatttctgttactttgtgaggctatttggcgaccactgtgcttgtaaaatagctttagtgacagttaagctttgtcacaagcagggtctactttgaaattcagtctgcacatctgcctctaaccagccttccctgtcagagctcatagattagctgccatgaagagtcatcccaaatgtgttgggtctttcatggataggttccgaagtcattcctacacaccagagtggatggtgcaatggaagctatggcccttatcacagattcggatttgtgtagtagaaaaaaagacttgtctgggaaccaggaaattgcggttctagttccagcataatcacttaactcaatctatagttactaaacttcttgaggcctcagtgtattacctggatacactaggttacgtagcaataataaattaacaatgacctctcagtggcttcacacaacaaaggcttatctcttggtcctcgtgtgtatctattccaggtctgcgaaaaggctctgttccctctggtcactcagggacccagcctgatggaggttccatcacctagtagtttctgtggcatttctaccctccttaaccaccaggggtccaggaaaggaagagatggaggagacgtgcacatgggctttcactgccttaattcagagctgtgcttcacttcttctcagagcccattggccagaacttgtcatgtgacctcgcctaactttagctgagctgcgaaatatagaggaacaaatggaatcttcaatgacaattatagtctaggccatattgagtttccacatctgttgataaagttatgataataatagtatgatttacctcatagagatgttgggaagatgaatgcatgtgacatgattaacattgtgctggctcatagaaagtatttcacaaattctagccataataagtatattattattattattattattaagtgggaaataagttgtagcattattatcactatgtaattcttctaagagcaaaagtgactgtgcctaagctcttaaccatttgtgcctaagctcttaacctgttgagccatcctgaaggcattctgctgtacactctgctcaaggaagaagaaaagcttgttccaggaaagcttgttgttgaactgtatgcccttcccccctctacctttggtcctaccccttctgccaatcctggccatgactgcccctgtcagcaacccagggaagggtctgaggacattggaagcctccagctctttcttctcctacatgattttccagggctcagtgttcccctgatgctcccaggctgtcagtgtgagacacccctgtggcctccagagtcatgatgggcccactcaggtttcctggcagtaaggctcatatgcaaacaaaactggaaccagaaggaattataaaaatggttccactcctcaagcacactcttgtctggaaatgtttttcaactttctattctgtttggtttgtggaggttaaaaaaaaaaaaaaagagagagaacgaaaacaaacctacaggatctgattaaaagccaaaaaggctgttgtaggagaggccacacttcttataaacatacaaatgcacagcagactatctgaagtcaaggtggtctttgagcctaataattggtagcaaatttagccaagctgcttagcctgagagtgatttctgtcctctgactgctacgttggctttgcttgcttacatttggtcttccaaatcagtgccattcctttctacctccatgcctttgcctgtgctattctttcttcctggaacaccctttcttcctgtcccttgcacgccacctgttgaataaatcccactaattcttcaaggtgtagtttaaatgccactcattgtttccttctaatctttcaaggtataatcacaaggattatgtctttgtatgctattagcacctagcatggtgtctggtgttcaataaatgttgagttgaaatcccccttttcttcattaattttatcccttagtgttatgtttatggagactatcaacggggacaaagtttcaagaaatttggggaaagctgcttctgccccagagtcccttcaagaaaagccttaagtgctgaaattccctgagaagtttaagcttgtaacacttgcagtggttcccccaagaaatcaacccgaactatcttgtatcctcttaccttgctgaaattgattttcaaatgaaggcataatgttagcttcatctcatatgaggactcttcttcccaaggaagctaccttgttattatagcaactacctttatggagctttcccgattgcaaagtatatgtgcatacattatcttgtttagcactcattgtgatcatggggcttggtagagcagaggatgacattgcgtacacaactcctataatcaagggaatctggcagtctctgttatttcagcagagtcaatctaaacaaattttggatggcttgggggaaagaaactcagaatttaccagctgctataacctcccaaacagcatgaagaaaatgacactgttgttttctggaaagcaaggtttcatacccaagaattattgtagggatttggaatcccaaatcaagtattctcctgtattttaccacatatttaaactctgaggtgcttgcttccaaactggtcaatgtagcaactgaatccggggccattagccatttgttctgatccagccacgtcggctagcagggctctgaatcaatttcaaaaggacatacccataagagccttttgataggtgaggtaggggttagcttggtggccctggaagaaatgggtaactaatgttccaagagcaaatctttgactggtgggagatggaaggcggtagataaattattctcccgttttttttttttttttttttttttttgcagggggtttgaggggaaggagtctagctctgtcaccccggctggagtgcagtggcgtgatttcggctgactgcaacctccgcctcccgggttcaagcggttcccctgcctcggcctcccaagtagctgggattacaagcacgtgccaccatgcccggctaatttttttgtatttttagtagagatggggtttcagtatgttgtccaggctgatctcaaactcctgacctcaggcaacccgccagccttcgtctcccaaagtgctgggattacaggcgtgagacactgtgcccggcccctttgttttctaagcaaaataacacacacttaccaaagtttacaggaactgtatgtttagaaactctaagaattcatattctattctcaaaaccaattttcacagaaattggcttcataggagttattttattttcatcctttacgatggtcatgctgaagccagtaagactgattgcaccctaactcagagtcacacactggattaggtagttctggaattatagacaagtcttccaaaaatccatagtcagctagtcaagagaagtagacaggtaaagtatgacatattgtgaaaagttttatcagttatgaataaaatatcatggaaatagagaagatgggggaatagtttctctaggggaattgaaggaaggtttacttctttggagatgtcctttcttgaacttaccaaaaacttaccaaaacttacagcaactctgtgttttgttcacatcagtacacttagttgtagtatcattccttgttcagagcaaagcattcagtaagtattttggcctgaaaaacagctaatatatagcggcgaccactggccaggcactgtgtgctttccttgcattatgttatttaatcctcacaggagccttacgagcttcctcaggagagaaccaagagttaaagaagttaagatggtcaccacagttcctagttagaggcagacctaatcctgaactcacctctcttggattccaacccatgttctcaaccactggaccaaactcactccattaattagagaagctgtgttgctgttttgatgatcattgctggtatgattactggccacccattggtgcccttaactcattttcatagcaaataggagactgtcacagctggggtaattagaacaggacctgagaacccctttggccagatgccttctagaaataacagtgtaccggtttgctcaagttggagagcttcattctcttgaattgtatgagaattccctggctaaatgtcaagcctacaggtttacaatcttccatctgactcttgagctaactaacatctgagaatccctgcattgtttggctttggaagatatgaagaaattagacttttgtctttaggtttacatttttcgagtcctgcttttcagaagacatttccactaggttgggaatgttatacaacagctgtcacacaaagttagcagggcgcacatgaagtataaagtcaggtgaggatactgcctatgggcatggaacatcaaatagggccttaaaaaaattggacagcattctttaagaggaatcagccagcctgtggcctttgaagcagtgacaggaaagagcccagaaagccttgcttctttaagtggcacaacttgctttccttgtggtcctcaaagtcagctcaacagaagccacaaacctgaggtttatgagctggatctgtctgccaaggtatgggtggcccgcatggtattgaaacagttttgaatcatttatcacgttttaaaatcaggagtgagaagaatctggacctctggcctttcctgaggcaatgaggcaatattctgtctccttttctgaaccagcagttagtgacatttgagcagacactgtgctcagctcaaagggagcccctgccgtttcatccagttcagcactgttcctcctcaccctccactgctagtcacctggctgcttcactcatttccatgacctgcctggccactaagcgtttgcacacatgacctagagcacagctgggaagacagctgggggaatacagaaagcagggcagatggctgctagggcatggtcttgaaataaaaaccttcctgtcctacctgtttaaaagtccctctgctgacttgccagttgactctaatgtatttggaggtaacagtctaaattttgagtagctggagctgttgaagtcatctctgcaagtcttcaatagtgtgagcacaggaatggttatttgaaatatagaacactgaagcaccaggtcgagaggacatcgaaggtgaaggagccactcaccaaagatgaagcattaggaaggtctaaagtagtaaagtagaattaattcagttttagagaaactaagttaaagtgtatgtagttcctccaagtagagatgtccacctcacgacgtactttagaattagaatccaagtttaaaaccttgcccaagtgcgtgcacctaagcggcctgaatgaaagccaatgttatcttcatcatacaaatgttagctgcttttcaaactgcttttaattagctcatagggttttcacaactcttggaaatcggtgggactcgactttcacttttagacccagatacagaatgacacttatgaagtttcaggttctataatcaaattaagattacagcctggggcctaggcctctggcccattgctcttcccactgtaccactctggtaactccaagtttcaggacagtcaagagactggattctactgtctacacctaggcctttgaattcaaacacgcatggttctgctctagctaaacatcatttcactttactcactatgccaagccatcttttcaattttagcaaaagctttttatcatctgagaatcttttatttctgaacttcccccaggtactgtggcatgctgtattctaggctctcagcactttcacattaatcataattctttactagaggcatctatggcagtgagccccaaattcaagctgctttgggtttcaggataattgatgcttagtaaaatctgatttttttcttttaaaaacagcaacaaatttacactcaaatcagggtttaaaccataaaatcgcagggctttaaagctcacagtgggggccggagcgggggcaggggcaacaggcctagtcagaggctagaatgtaaaagtgggtacatgtcaggttactgaacgtcctggttttgagtttggcttctcagattgacctaggatatttctagcacctgcctacccacctagcttgtttggagcaccaaggatgtacacacatagcatgtcagtttgtatgtacttagcagttacagagatatatttatgccccaaagcttcctctgtaccagccatttgttggtttcatttttaatcttaataccttcacacataacaattatatatttattaaaatttcagatcacctagttctgttaacaaagaaggttggagacaagctagtctgtcttccattttttagtctaagacctctttcttttgaaaaattcatttggtttgtatggataactattctagataaggcaaacaaacgaagtgtttggctctattaactttttcagccaactttcccttggggaccaccaccaactgaataatgaatactcaaaaaagtacagcttataacacaacttttattagaaaagttatacataacatagcatcaactattttcaagaacaatattaaacccgataagcaacaaaaaccagactaacaaaatgtgtaacaagaaactaatgacctttctaaaatcaaacattcaattatctacaatgtctttttacaaacggggaaaactccttggtttacaggcacatcatattgaatgtaaagctgcaatagcaattttatacaattaccactctgaagaaactgaatcattaaaacagtaattacgagttcacaaatttaaaacatttcacataattttaaattattgggtatacactgaagtctgagtttcaaaagtgatttttttttcccacaaaagtttcaacacttaagctagaactttcagtgttaactttgccctaaaaagttaagacattctgataatcataacagtcacatgatttctgatgctatctggtctgttaataataaagtctttatttggatgtatttttcttcaattaaattacaggaaactggatataggatttcgttgcaacgctattaaagttccaaaccaggagtgtgcagcactggaaaaggagatcagtactaaaacttacaataaatatcagagaagccgttagtttttacagcatcgtctgcttaaaagctaagttgaccaggtgcataatttcccatcagtctgtccttgtagtaggcagggcaatttctgttttcatgatcggaatactcaaatatatccaaacatctttttaaaactttgatttatagctcctagaaagttatgttttttaatagtcactctactctaatcaggcctagctttgctcattttggagcctcactaaaataacagatttcagtatagccaagttcatcagaaagactcaaatggaatgatttacaaaatagaacactttaaaccaggtcagtcctatctttttgtagctgaaggctatcagtcataacacaatttcgcgtacacctctgctcattatggaattacacttaaaacgaatctcaagagggtgaccattgttgtttcagataccatccctaaggagagtggttaacaggaagattgccagtgttactgatggaaagaagtgtttgtttgtttttttttcttgtcaaagacttacaccatagttttaaattaaactgtcaggcattttctcagacaggttttccttttcaatgcagtaatgaagaactaagataaaaatcatgacttttgactgccactcaacattattacatgcaccaatattgcacacatctgttctgaactgttaaaatcatcttctgagtccttggggtgctgttttctccatcagaacacaaacacaacccatctaatcagtttccctcaaagatgaaattgacaaatttaatgtactggaaaaaaatgaagaaggaaaaaggcaaagactttgtacagacaaaaatctaagttttctcaaagggttctgtgtcccctacacatgggggcaatttgtaagcactagtgaatcaaacactagctataatgcttctagctccttatataatatggaaccttggtccaggtgttgcgatgatgtcactgtacggttcttcctgtgtcagctcaatagcttgctgctttttaagaaccaagaagctgtagaactttgcggcagcttgttttctgttcgtatttcgacataactcaagcaaactgatagattcagctccagttttagcaagagcacgctgaaataaaaccaaaaaagggtaacttaatctgtataataaagtagtaattcagtgaggatgctgatacagtttgaatatttgtcccctccaaatctcatgctgaaacgtaatttcccagtgttagagatggagcctagtgaggtgtttgtgtcatggggtggggatgggggtggtggtggatcccttatcaatcactccctgtggcaatcagtgaattcttgctcgttagttaacacaagagctgcttgtttaaaagcgcctagccatctctctcatgccctctcttgccatgtgacacacctgctccccctttgccttccaccatgactataagctttctgaggcctcaccagaagcagatgctggtgctttgcttcttgtatagtctgcagaactgtgagccaaataaacttctttataaattacccagactcaggtattcctttagagcaacacaaaacagactaacacagatgctaattttggttactggaaaaaacaaactatatattctgcttaggacaaagattgcacttttttaaatagtatgtgattctcatgttaatcaagagggtaaaaggccaaagtatgttatggtacatctaaaatccaaataagaaagtccaagaaaccagcaaaattgttctgacatgtattattaaaataaccaatttctttagacagctaatgtaatatagtagtaaaatctagcacttatagtttttaaagtaaaaaattaataaacacatgtcaactgtcctattttaagaaaccttgagcaacttgcttggcattttgcagacattcaagatatcctgtctatgtctaggacattaaagcacaaggaaaagtaacgtctgatgctacacaatgacccaataaatttaatgattcagcacattaaatttactcaacaaaaaacaagaaggtgcaggcatacaaaggagttgtgtggtatgtcaccatggttctgcttttcaggaaaaccacaagcattctcctccatgcttttccggcttactcttggcctaacagtttatgtatttaattaaaacttaaactataataaaaaaaaaaaagaaaagaaaactctccctccagaaaaaataaataaataaataaaaatgtagttttggaaaaagtttgacaaaggtatgctttctgtttccagcatctaactttttttttttcagggaacaatggcaaaagcctttgatgaagcattttcctctgagacaacagcggcaatacctgaagaccatgaagcatctgctgagtccttttgttccatcttctttcttcctgatcttgatcgccccctgatgcatcttcatcctgaataaaaatgacccccaaaaagctgacaaaacaagtccaatgaaaaatgaagtatttctacatctcctaaaagctcctaaattaccttgagattgtgtattttgaactaatagaaaactgtacttaatgctgctgagcaatcacttagcatttagagtacaaactgaagagtctgtttttcttaaattacaaggcaaagtcctctatgtgcaagcaaacatttggctgaaagtatgcttctatattgcgctataaggatgctatctacacacactatgtggtctgtggactgctgctgatcatggaggttttggttactggcccctcttaaagaacttcaggatataaatcaactgtaccactaaatatactgtttatttcaactaaatatacatacataaatattgcaacatgattttctagatgactaatgttctggcagactcttaatctcattgtggagcagtaccaaagagcctgcagactacctaagttgatttatatggtgttttaaaatgaatgggctatactccttattatatatttcacttgagcaacctagttctcagccacatgctgcctaaatgactttttaaagtccaaggtgggtgcaaggcagcagttgtgatgttcccaggctatggtgaaactatataccagccataacagaaaccacaactattttaatactcattcacaactaagtctgagataatggcacatcctcacacataggtagaagtggctctgaaactaattttggctttaaaataagatattcatattaaagataagcactattattagaattaagaacagatgctactgaaaatttatccaatccataaccttttttggtcttgaagaaatttaaacagcttcaatgctacctaaaggacaccttattttaaatttaaaggtttaagtaacatatccgatagagtatcaaacagaagaataaattctaagtcttaaacaacaacctcaatgatccagaaattaggaagaaaaagaagaaaaaagaccttcaacagtgtaaacatgccccaggaaaaagaaattgattcctaaaacacctcttactttgtaaaaagaaaaagtcatttaagccttcactcagtctaagtgttttagcaaagttatgctttaccctggtccaagtaaaagaaaaacaaaaacaaaacccagacaagtggaaaacatatggttatctgatttccaggccaccacagatacagaaaaggttatatcagaagcagacaataacagcagtaagaatcgtccactgaccacaagatagtaaaagcagctacacgcaatttagaagccaagcaagaaatcagtgtaaggacaattccatgtccttcaaaaccccacaagagagccaatgagttacagcgaagcataaaatttgatgttcctaatgatgatcaataccacgaagaatatggtaaaattttgcttatattctaacatttttaaataactctgatgctcagcatcaattaagttagccccaatatgaaaaataaagctggttggaggtttttgctaaatctggaatgaaaattattaattagtttacctcttcctcttcatcatcttctttttccttctctttctccttctctttttctggcagaagttctaactctggtattagctgacagatatttggaggttcttctgggggaagctctacaggtggtatttccatctgctctacctgctgaggcttaaagcaatacaaataagacaatttaagatatatgcttttaaagtagcttattttaaatatgaaaatacacagtggctgaagttttctagtcaaaaagaaatactgagattatatctctatacttccccacaaggaaaaatttattacagtatatatcttttttgattttttataaaactacattgaagtagcttacaaaagaaactgactgcttatcctaaaccatgtttcattttcatacttactttttaggagtcaaatgctttttaactactaaagcttctgtaaggttattatattgtaacttataaatcataagctttctctctgagagtcttgaatgtctcacggcagcaaataataggagtgaggacattgcttttctgggtccacttcctatatcttctctcaggctttacagaaagagttaagaacattaaaaccaaagtctttaaaagaaactaaagaattaccagaaggagggtggttatgaaagtcacctactcattactgtgttcctattcctgagctcatacagaaaaatgctcttattgacaactcttaccaccagagggcacagaaaactagttcttaaaattggcagagtattcttgatggaggctgaacaagaagcctaaggttatctaaaagcctccctttgcacaaattcatttattctatggacttaagattggaaagccctaaaccaaaccctactatttcctccttcatacttgcttagctttcctatcctagctgaactcaatggtagtcaaagtttgaatgaagcagacagatactgctttacattttctcaggtatttgaagtttattctgattacttaataagatgacctaaaactgcctagtactgaaggtgtgcaggaatgtttgccaaataataaatcagaaccaacttcagagtcaaggatgctcactctggagcactctaaagcaatactattcaaaaagagtcaggaaagactgcaccgactcccagaacatattctctcactccgagtggactgtctatatcctgttgctcttcttcctctggactcattccttaccattttctgtcaaaaccaagatactttaaaaggcctccctaaataccacttgctactgactgtatgaataccttcaaatgacttaatggatagatttgcttacttacaggcatcacaggctctgggtcaatttgtccagcttttcgcttaactccctgaggtggtggtggaggcatagctgactcatctatgtttgttctgctggcctccatcactgactcctggaggcggcttggctcttcaataatgggctcatctgcaattggtcatatgaagagaaaacataggtcatacagttttgaacagtattatagaaccatttattttttaaactagtacactaagacatacataatgctttctttaatgaagaaggccagataaaattttagctccataaagatttactcaatttttagcaatatacgtaaaggggaaaggggatcttaaaaggacaagtcctaccctcagtacaatgtaggacaattctttagcagactatctaccctgccagttctgaaccttaaaactctggaaagacaggaggcttcatacttaaataaggcaatcagatccaatgcatttccctgcccaaacatttgagtatatctttgattcctcatttctttcactctgacagtataaaggtaaattttaagccaaatactcatgtgaacttcatcaaggaactattccaacagaacaaaccgataacatcacgctgctgatgctgctgttgctggtcctctctaggaacctctggattttcaaattctttgaggaattcatccaaattatctgcctctcctcctttcctcctttttctaaggtcttctggtacaagcggtgtaagacagcgtgtaaagagctattaaaaaaaaaaaaaagaaaaatttcaattataaaataaatctaattaaaaagtcaccactgatttctatcttccaaaggtatgttctaataaatataagtgtataatttagcatggcttttatcatattcacatttcattccatctgaaaatgattttaaatgagttttcaaattataactgcagacattttagataaactaaaaaaactgtatccattatctcacaaccttaagggcttttctatttatctgcctgcagtttattttcatattcatcaattaaaactcatcctaactggtctcatacaaaatagctttaaattgtgttttcttcccttacatatggtaaccttattagctatcatttaaactattttttttttgagatggagtctcactctgtcgcccaggctggagtgcagtggcacaatctcagctcattgcaacctccgcgcccccggttcaagtgattcttgtgcctcagcctcctgagtagctgggattacaggtgtgtaccaccacacacggctaatttttatattattagtacagacgggattttaccatgttagccaagctggtctcaaactcctgacctcaagtgatccactcgcctcagcctcccaaagtgctgggattacaggcatgagcgactgcttctggtctcatttaaactacttttaatggctacataatatttcattttgaaccattcctctacttttaaaatttcaggcttctctctttttaaactgtaaagaacaatgtaatcaacattttcacagagatagcttttccacactttgaattacttccttaggaaaaatttctaataatgaaattactgagtcaaagaataaatagtttaaggaccttcttaaaaataattatatgatagggcttacaataaagagcacaatgttgttgctctgggatactttagatttagaatatattactatattctaaatacacggtaaaatcaataggttctgtgcatatctcaacttcagacagaatagtagcctaacagcactgcttcattcaccagacacctgtgagtcttattttggaatactgtggaatgtgagcagaaaagagcctataaatggaaaaacaaacaaacaaacaaaaaaacaaaacaacaaaaaacctcctgaagccagaattctttactgtggaaaaaggagaaccactcatgtttcattcagaaaacatttcaagaattcagatgtaaaacacactaagacgatataactaataatttattacagagagaagtattattaaacacgtcagtggctttttaatgtaaggaaaattcattttacatcttttagaaatgcaggtctcacttatccatatatttcagatgaagttatgcccagtacactgtgatttaagggagaaaaaagaaaatgtgccatacagttgcaaaatacttgatcaaaaatgattcaaaggttttagaatcttttttttttagatgctcaaaatgtatatgaagtaaaaattctgcaaactatattaccttcagtagtctgttattccacaaaggctgagcaggtaaagaaaacagtttttctactcctcctgtctctttccacatcatcaatttcttggtgggcggtgccagatccaaagtagtaacaatatctgaataatcactaagttgggctctaattgtcttgctatccaactctttgacactgtcaacaattagcttcctcttcctcttggcttttgtttctttaactggaatgataataaaaaataagatcattttcctgagaggccagcatggaacacacagctacaagatctggactgactatattcccctgcttttctacacacagactctagcagagaagttaaacttcatgaggatagaacgttttaactcatgttttccaaccaccattcagaagagaggctggaacacaacgggcattcaacaaaaatttgctgaatgagtatgtatagacttttagcacaaaataagcaaaatgacgcaagggccaacacatttttgcctatgtagttttatactgtaaacaatgaacatatcacactcttcagagttgggctcattttctcatttgaaacagggcccatcactcaaactcacagattgagttttctttaatgattgtaaatactgttatttttattagaaaagttgtaattcacatatggcagttgtggaagctgcttgatagaatgaaacaagcccaagcccagtcagatagacctgttaactccatcctagacattttaagagtcatttctaatccttacaacttacaagtaggttgtattgcctcacttttttaaaatgcagaaaagcgcatggggttaaataaaatcctcaagatttcaccctgtcagacataccccaaaggtttttggttcaacacttaaaaaaaaaatacaaaaagatgttacacagtgagagtctctctctaatctcaccatctaatacagtatatattttacttaattgcccatttccctcatcaatgggaaacccaaaagggtaatcttgctctacttaaaggtaaaaactatgtctaaattacactgtaatcaatttcaagtattctatcctactgtcctcataaaccatctagaaattgttaggttttatatccccattatctcaaattgtctgtcattcagaagcagccttcctcaaattaaataatgtgtcttgcaatgttacttaaaaaaactacaagaaaaagattattctagaaattttgacatttccagtttttaaatttaaaaaaatttcttttttcagaatgtgtggaaaaaggcaaattctaagagtgcataaaatttttaaaaaaatttcttcttgaagagacaggtcttactatatttactgcccaagctggtctcaaactcctggcctcaagtggttttcctgcttgggcctcccaaagtactggattacaagtgtgagccaccacaccagcctctagttttgttttttttttaaaaagaatacttttagttttttccagctcgtagaccaactgcacagcatttagaattgtactttattgaaaaaagctttccaatgttttccagttgttacacaagtaagctgctaactttctgggaaccccaggagactaagatatgcattatcagaaagcttgttctatacttttgtatttcacagcaacttgcacagacattctacaaaatactcaaaattataattggatagaagaaagactctatgacagatgactgtgacataaaagcaagaagctagttaactaaagcaacagtagcagatcagtagacaggccaaaaaaacagaaaaaagcaagaagcctagttatctaatacaacagtagcagatcagtagacaggcaaaaaccagaaataggaccttatgttgtatgctgtataaatctaaaggttcatatgcttaccagttatatcaataggctccaatgcaaatgcttcttcctcatttggaacaagtgttgtttgatcagtcatggttggcattggttcaacgggatccactgaatcaggactatcaggcccacccactgtaaaaaaaaaaaaaaaaaaaaaaagtcacaaaaagctttggtatataacatatatcccacaaatggggaggagaaaaatctcttcatgaaatggaaagaaatcctgttattactaagaaaaaatatttttctagttaatgggaaagccccgccagacttgaacccaattggccaaaaaaatggggaggggtgcaagattaaacatagaatcagaaccagtaatcataagcactgtacttaaagatatttataattcactaaaaactacaacttttagtttgtcatcttctatggtaagtatctttctggatgccatacaatcatccccagaatcactgaacatgaaatgcttacttgatacattatcatcctcatccatatcgtcatgtgcaggctgctctggcaacatcacccctgcctcagagagggcagggggatcatcaaagataccgccatcattattactaataagtttgtcatctgaaatagggaatgtaagttagttataatttgaaaaagaaatgccaaaccacaacagccaatcaatggaaaaacaaaattatgttaaaagggataaaatttaaacgtatactcaacttttatctgtttctcctccaggtagtttataaaagtataaaacacttggtatataaaaaaaaattctcattcttcatttgtattttctagtttatttatctattttaaaaaatattttacttaacacagctatcaaacacaaacagaacagttttaagtactaataaaatttagcattctgagataagcatatttaggttttgttacaacattttaagaggctagttttaccgaaatgtcctattgaaccaactgatcacaattcactcatatatatctaaaagctgttcaagactcagaattagcaactgtttccaaaactttacaacttaataaagaaattctgtttatgctggaataaccatcattcccacatacctaatattccaccatcatttccttctccaaaattatcatccttatattgatcttcatattctaaatggttaattttctcattcagattgctggtgctctgttcagactctaataggaggttagaagtagtagtgcttactaacatgtcgtcatcctcaaaagcactgccttctctcattatctcacgatcatccattccaaaatcacctaaacaaattttaatttgtcattagtttagaaagattagaaatagcactgtgataaaagaaaactgctaatgatttattctaattatgtcacatttgcttactgaagtcttacttcaaatgttaaaatatctagtttaaactttaattctttagcatctgaattttttaaaatgactcaattacacacagttacaacactggggcatgactagcaaattcaaacttagatctagatttaaatgatcctaaaatatgtttgataaactctaaatatgtatgtatgttaagttacattaacagtcacagctgaaactttcccgttataatgtgtttcatcaagaaaagaatctggttctgggcacagtggcatgtgcctgtagtcccagctacttgaggctgaagtgggaggatcacttgaatccaagagttcgaggctgtagtgtgctataatccagcctgtgaagagccacggcactccagcatggataacacagcagagaccccgcctcttaaaaaacaatatgccttgctaactagttttgaatacctgtttttgaatagcaagtataacagggaaactaactgttccaaaatggttggtttaaacgtgatcaccacttcaatgttgggactcctcgcagaaatcaatatataggttctatgattgcatatagggagagaagtaggtaaacaattagctccaagtatgaaaataatgcttaatctactggtagaaagccaaattcttttcttgatgaaaatgcattacatgaaattttaagtctttctgtctatagtctggttttcttttgaaattgctattagcaacacaatataacattataattaatggctaataatttgtttctcttttaccaaaatcattttcttgtaaaatactgatgttcccaacttcttctctcatggttatctcttccactctactctgattcaagctgaactgctgggccacatcgatgtcactttaaaagaaggtcaaatacattttagtttcaagtctatgtataagaaaaacaaatcccaattctctctataagaaaaattaaaaaaatatatatgtataacccaccaagttttagaagccttaatatttaatactttcacacattccagtacaatccaagaatgtaagtgatttggaaattaacttgtatttaaatttgaaaagcatcaataatcagcaaatacaatgtaatatgcagaagtcactaaatcaagtacagaggaaaaaattagaaatcatgggctagataggcatgggttttcattaggaccctgcaacttacaggcggtgtaaactctaaagttccctgacttccctgagactcagtttctttctctaataaagaataatctctcatatagtttaaaaatactaaataaaaaataaaaagtatgtaatgctaaacaccaatctaaacactatcagccatatccagaacattaatacctcaaaacaactgaccaagtctgtacaaaaaatagatggcaaggaaaaaaaaaataggaggcggcaaagctgtaatagattctcaggagacccataagctatatcaaccagatgcagtttgtagactttgtttagcctcaactcgaactgggagaaaaaaaaaaaaaaaaaagccgacatgtcaactggggacatttgaatgctgactggctatcatataggcataccttgttttactgcactttgttttactgagtttcgcagatgctgagtttttaacaaaccaaaggtttgtggtaacagtgccttaagcaagtctgttggtgccattttccaacagcacaagcttacttcatgcctctgtgtcacattttggtaattctcatgctatttaaaaatttttcattattatatttgttatggtgatcttgattagtgatctttaaaatttttttccttattttttagtagacatgggggggcgggatcttactatattgcccaggctagtctcaaacccctggcctcaagtgattctcccacctaagcctcccaaagcactgggatcataggtgtgaaccactatacctggcccagtgatctttgatgctagtattttaattattttggagtgccacaaaggatgcccaaataatatgggcaaacttaatcaagaaatgttctgtgtgttctgactgctcctgccctcccccacccccgcaatgtttctccctcttcttgggcctccctgttccttgagacacaactacattgaaataaggccaattaataaccctacaatggctactatttgttcaagtaaaatgaagagtcacatgtatctcactttaaatcaaaagctagaaatgaataagcttggtgaagaaggcatgcctaagctgatttaggctaaaagctaggcctcttgcaccaaacagccaagttttgaatgcaaaggaaaagttcttgaaggaaatgaaaaatgctactctagtgaacatgaataagaaaacaaaactaccttattgttcatatggagaaagtttcagtggtatagacagaaagtttggaagaaattaacattaaccctgatgcatgactttgaggggttcaagacttcagtggaggcagtaactgcagatatggtggaaaaagcaagagaactagaattagaagtggagcctgaaggtgtaactaaattgatgcaatcttggaataaaactttaacaaatgaggagttacttcttatggatgagcaaagaaagtggtttcttgagatggaatctactcctagtgaagatactgtgaatattgctgaaacaactacaaagggtttagaatattccataaacttggttgataaagcagtggtagggtttcagacgattagctctaattttgaaagaagttctactgcgggtaaaacgctatcgggtagcattgtacgctacaaagaaatctcccatgaaagagtcaattgatgcagcaaacttcactgttgtcttattttaagaaattgccgcagttacctcaaacttcagcaaccaccacctgtatcagtcagcagccatcaacatggaggcaaatcctccaccagcaaaaaaactgcaacttgctgaaggctcagatgatcactagcatttttttgcagtatttttaagataagctcactgcttttttaaacataatgctattactgcacacttaatagactacagtacagtgtgaacataacttttataggcactgtgaaacccaaaaatttgtgtaacttgctttactgtggtggaaccaaacccacagtatctccaaggtatgtctatattaaggaataactgataatttttttaaaggtgtgatgggtcatggaggctttaaaaattctttacctctaagagacaaatatcgaactattacagatgaaataagattattgttacttgatttaaaataatctggtgggggttgtgaggtaagctggggaaacagatgtaataagactggcaatatacttgtaacttaaaaagctgaataactgacatataaggttcataatcctaatttctctagttattagctatgtttaaaaatttccataataaaaaattttcaaataaaatgtcaaaaagagagaaaaaagtaaaatagctagatagagcctagaactaatcaacacacatgcagtaacaaaataggtcataacttactctaattagaagccacagatcatttcaaaaagcagagaaatctgtaatggtgtagagtttcttggttgtcagttatgctaataagtcacttggaaagctacagtcacgttccaacatcatggcatgatagctggatcgtaagggcttgagaaaagggaaacataactacagtactctgctataacagccatctctgtgtaactctctcctctcaaatgtgtgtcatgacaatgaccctttgttgctcttcataaaaagttatctcgtatgttcatttaaaacaaaaataaaaacaaaccagaacagaattatggctctgagtatagcctggccaatccagtagctgactttaatatataactctgaaaaatatcatgaagcaacagtttacattccctgctatcattatataacaagcgtatctgtttcagtttacgtaagctttggcctaagcttgtcaaaactctcacatcttagctgtgttaaagctgacatccacatgattttcttacagaagaacaactttctaggttttatgttccatatttatatactatcctatataaatatatatatgcattttagctgttaatgtaaaacattccaaggaaaactatacatttggaagctaatactactgcttattgcagaccaagtcaacaattttttttaaaagaagacacatactctaagtcaggcagtggctgatcaaagtcatgaaattcttcaggtaaagtaatggcattataagctgcttcccgattttcctcaggcaggtcaaccacacctagaaaagaaatgctaagcttaaatatctagctacccataaattatctagggatcagagggagataagtaggtataacttcctaagtttatattctcatagaaaggttgataacatatgcaaaataccttgaagcacaagtacttctctttttccatgctcataaattgtattccttgctttaggaaaaagtcaaagcactaattatgcattaagctcataaatgtttaaacggacatatcaacaaataactagtaatagtttcctaattaaacatgatatttatgagggggaaaaagaataactgcagaagagtaccttaaatgttaaaaggagctggttattttggagaaagaattacacaattttaattttctttatctttttcctatatttttcaagttgtctataataaatatgccttactttgaaagacaaaaaaaagcatgttatttagataaaatgtgcttattggtcacatgttaatttaagtattgtagtctttttctaaatattttacttttaaataaaatcttagatctcagacattttactgttcacatactgacataaactgaagtactagaatgtatcctcagtagaaactgtttaaggcatttcttaataaaatacacattattttaattagaataaaaatttcatcaatgcttttaaaaattatagaaagatatgtgaatttaaatattaattatcttcttagatggtggtgtggttggcagactccagttttataaccaatcattacctaaaacaaaataacaaaaaactacgaagaatatttacttaggaaaaaaagtttaaaatcctaaaattgtcttttctgagctatattttaaaaaatcatcacataacaattagtttccaacattttaacctcttgatgactcaagtctatgtaagctgctgaaaaaagtattaaaaaggcagctccaaaggaagaacaaatgggggtgagctccattacttcacagggagaacagacgcaagtaggtttcctcccttgaagcactgcctccccaagccttgctctatctttgaagggttcctcgtatttcaattaaaacaaagcatgtagatttagaaaatgtgtttagctacagtaacacaaaaaacatgagaaactccaaagtaaacaacaacaacaaaaaccaaacaagtttaacaatacctggccgaaaagccatctttatcttaatgaatgcttcattacagtctgcaagaaggtatttggctttcctgtgatagattcgaactactcccagtaagagatgtcctgatgtccgtaatgccattttcacctatgaataaaacattaatcatattccaaaacctgcatttcgtgccattcatagtcttctttttatctttttcctttaaagttgccttataatcacatacatttctctgtccttacctataaattccctgaatatcgaatatcctgaaaagacagagtgactggaaattcacgaattaacacaaacatgaaggaagctaggaagcaagcactaaaccattccatgaattgtgtcattagcacattaaggagcacgtaacacttttggttgccaatccagggccattgtttcttgctaagtcaattctgattttgtttgagaagcaaatgtcccccacattgacagatgtctcattcctctctgctaatacctgttcttcagtgggcatgaaacacagttcagccaattgagtaataggtgaagtatgccagagagtttctgagaaagatttcccccccaaaagaacaacgcctctcttccttccctctttcctgctttgtgaataggtagggcttgcttggtgcttcatgcagtcaccctgtaaaccacaatgctaaagtatgaggacaggaagctaacacactaaggatggagagttcttggatgacataatcaagctgctggaccaatctcagatctccctgtttccaaaattttagttaattaagcctgttatttcccttattgtttaagctactttttaactaagtttccattaattggaaagcataccgatttaaaaaaaaaagtttggaaagcatactaattgataaagaacaatagtatccatagctttttttcaccagaaaatatactcccaaccttttttcgaggcagatcttgatcaacattaacatgggatacagtatgtggaaaagcagtagttgataaaacaatgagataagactccatctaaacacaagtattcaaaattcctctagccataaggaaaatttactgaaagaacaaggcaatatgaactcaaacatccccagatactttcccaaaccacgccataaagcacaacaagttctaaggtaacaaaaaaagcttttaaacatttgcttaatgtttaaattatgattagtatattgttatttgtaaaagaaaatgttgtattttaaattttatgtgtattttctacagcactctaggaccctacttatgactctcaggttctgtatttatgagcattttatgtgacttacagcataaatgatgatgtatatggccatacatttttagacatccaaaattataccaaatttgtgatcaaattcagaatttatcagacaatgaatccctaattttaaaaaaattcaaagtaaaatgttgctcctaatggaaaaacagaatctatttttatgtggtgttataaaatttaaaattaatattgattgaaccttcacctaagaacaaaggagggaaaaaaaacctctgctattatcttatctagaactagcaactttcaaaaagtggtgtttgggcaaaagctttctttctggattagtctggttcagagtttagcctaggagtaggtaaaatgaggtatggcatatgtttttgagctagtgtgtgttaaagtgtaaacataaatataataaagattccaggctacatattctgggaaagctctgcaaatagggccagtggttcttccagtgggggagtggaagagagaagagaaaaagtatgcaagcttgcagttgcaaatgagccacgtgtgacacttatgctaaacaactaaactgacattttcacaacaagaactgcacaccaaagcaaacattagaaatttcaggcccgttcactctgtggaaatatctttacatcctgttaccaaatagataaaagctcagttagaaatggtttaaaaaatttgaagagaaatcactttctctcataaacacattacaatcttttacattattcctgaactgtctgctttcctttgtggctgttcgtgtatatgttcaattatcagattgtctcatactcgtttgtagtgtccctaaagtggcacaaagtactcggtacatatcatgaaaaaaatctgttatccttttaagccactcaatatttgcttacggatgttaaagattagccacacatatactttccagaaaggagtacgatttctacgttttccattaacttatcccagtaagcatacctataaaaaaaattgaaaataccaatgttctcatacaatttgaccagcagtgcaaactggtatgatctcaccagaacaaactgttagtgcatatcacaaatctcaaaaacatgtccatcacttggcctatcaattataatcctaaaaataaatcttaagaaacacttaagggcgtgaacaaacatttaacaagaaatgtttactaaatggctagtctttaaaaagaaaataaaacaacctgtaatcctaccatctacagaaatctgtaataatcttttggtatgccttctaggctttcctgtgtacatgtacacaagttttctttgtgtatatacataaaaactaacacaatgattgttagaaggctgcatccaggaaatagagcaaaacttacgaaaaggcacagatttcttataaacacccccttcctcacacacagataatcttccccacaattgacacctcccatcggtgtttcatttattaaaatcgataaacttatattaacacatcattaccaaaagtccgtagtttacatcagggttcacacgtggtgttatacattttattagtttgtacaaatgtaaatggcatttaactattatactatcatgcaaaacagttttactgctctaaaaagaatagtctgtgctctgcctactcaaccctccattctctccccaacctaccatctttttactgtctcatttgtatagttttggcttttccagagtgtcctatagctgcaatcatataatatgtagcctttttagattggcttattatactaagtaatacgcatttacagcacttccacgtcggttttttttttttttgagacagggtctcaaataaaagctcctctgaggaacagatcagtaaacaatatttgggcattgccctgactgatgcttatttgccattaaaaataggcaaatcaaaatatatgcacttagagattttttttaaaatctaatctgtaatcatatcaagtctatctagaggtgataaggacttcacataataaagaaacatttctaaggattttccttgcactccaatgcccctacctaaaaaaactgttttagaagttctatttcacatatcaataaacaatcaacaaagtgaataaaaatgtcaacatcaaacatacctttggtgagatgatactctccacgctgctctctaaattacactcgaacacatgggctttggttagcttcttatcccaatgggccgctagccaaattttggccagaggccctcttttactgagaacaaaatgtgcgtagaacattgttctggctggctatgaaaacagaagaaaacctaagaggggaaaaaaaagttaatgtaaacatcatctgacaatttaaatacttatcaagacataagaaatttaaaatttttcttctctctttaatatgaaaactataaaatgcttgagtaaatgtttaatatgtattttaaaaacaacagatttaaaacaaatctattgttttaattttgagagaggaaaaaaaaatagaccccaaaatactaagagctgaaagtaaaagggacaagagtcaaattgctttcatgccttgtttcatttctatcttgattgacagtagaaatagtctgtttactggccaagagctagagaatatatttttcatggcaagaaaagaaaatctatgaagaaagatactcaggcacagataaaaatctgtggaaatttccatttttagaatgccattaaaaatcgcgattctgggataaattatctgtaaaattgctactacacgaaaagtactgtactaagcatttcatattccaccaagcaaagctaagcagatgggctggccccattttacaggtgggtagtttagaaaaatcgaagttcaaaaaaggtaaagaattatatatatagttttcttaacttaagaacttacaaagcatttatctacttataatttaaatattaaatcagggacaatggtacagcagatttatcttatgactgaaagtcttggaatcacaaatatgttactgacattctactttccttcagcactctaatgtattaagaaaggccgcttgaaaaccccagttcagaagagtacattaactgcaggatatttcctttatatcatttaattcccctctttcacggatttaaaagaaatctacttcagagaatgaatttccagatttaaaacaaatctattgttctgatttttttctaaaatgtccacgactagaaaatgatatatgccttgctttacagaaataaaatcaagtgcatgtacaatacataaaattttaatttgaaatagagtcacagggagtcatagatagcaggtcccatgtacttttttaaacctagtttctcccaatggtgacatcttaaataactacaatatagtatcaaaaccagggcactgacattgattcaatgtgtctacagacttttataccattttgtcacatatgcagatgtgtataatcaccactgcaaaaagatacacagctattccatcactacaaaactcatcacattcatccctctctctctgccatttctaagtcttgacaaacaccacctgttctacatttctaattttgtcactttttttcttttaagagatggggtctcattctgtctcccaggctgaagtgcagtgatgtgatcacagctcactgcagccttgaactcctaggctcaagcaatcctcctccctcagcctctcaagtagttggaactacaggcattgagtcaccacactggacttaattttgttgttttgagaaaattatataaatgaatcatatggtatgtgacttcttgaaatggctttttggatctagcacaatgcttctgtgatccaagttgttacgtttatcaatagtatattcccttttactgttggacagcattccgtgagattcatataccaccatatgcttggacattcacctatagaaggacatttagttgcttccagtttttggctattacaaataaacctgctataaatattcatgtacagacttttggtgaacattaagttttcatttctctaggacaactgtcccgaatgtgactgctgacaagtattgttaagtatatgtttagtttttaaagaatctttaatacaattatcaaaatgagtttttttatatttataggcaagattatcaaatttatatagaaaagcaaataaactaaaaaagctaaaactattttgaaaaatagtgagaaaaattagtctatttgatttcaagacttactatatagctataatactcaagattggtattagcagaggaaacacagtcaatgtaacagaactgagaacccagaaatagcccgcacaactaagttcaactaatttttttttttttttacaaagatgcaaaagctatctaatggagaaatgatacatttttcaacaaatggtgctggagtgattaaatacgatctgaagaccagaaaacatgcacgcacgcacgcacacaccccccacaaaacaaaaaaggcaaggaaaaaaccctccacctaaatctcacacattatataaaaattcaaaatagacaaaacttttaaaaaatggcagaggggaaccttcagtacctaaagcttggtaaaaattttgacacatcaaaaacacaacccatgaaggaaaagttcttgctcaataaactcgcctttatcaaattaaacttttgctctacgaaagaaatgcaaagacaagctatagactggggaaaaaatatttgtaaaccacacatctgactagaactcagatatagaatatgtaaagaattcttaaaacttcaggggtaagaagaaaaaaaaactccaattagaaagtaagcaaaagaggccaggcaggctggctcatgcctgtaaacccagcactttggcaggccaagacaggcagatcacttgaggccaggagttcaagaccagtcaggacaatttggcaaaaccctgtctctactaaaaaacacagaaactgctacgtgtggtggcatgtgcccgtaatcccagctactcaggtggctgaggcaggaggattgcttgaacccaggctgtggaggttgcagcgagctgagatcgcgacactgcattctagcctgggtgacacagcaagactctgtataaaaagaaaaaaaaaagtgagccaaagaagagaaatttcacagaagaggtttactgatgacaaataagaacatgagatgttcaattatcctaggcatttgagaaatacaaattaaggccaaaaacattatcaccacacacttaatataagagctaaattaaaaaatagtggcaacatcaaatgctgaaagacacagagaagctggatctcttacactgcaggtgggactaaaatctcttgaattagcttttctctaaaagatacagagtaattatttttcattttttcacagtctgtaaatcttaaagaattttgcttactgtactttcaattaaaaatgtgccaattctttcccatgatgtagagaaaatatattttagttacgcgtatcacaagcaacagatttcttacatgtcaaaaatattttggagggtggggggctgtggtgcaagactactgcagtcaggtttgctttatctccatttccatcacttaagagtaaagagtcttgaaattctcattctctgaatctaatgttcccaaaggattattaattcatactaaaaaaacttttcctcaaaagaaaaaaaaccaggctttgtcaactgtctaatgttgtaaactcttcctcccaaatttggagttaaggaaggaagaaattggctagcggtggtggctcacgcctgccatcccagccctttgggaggccaaggtaagaggaatgcttgagggcaggagttccagaccaccctggtcaatatagcaagaccccgtgtttattttttaaaaaaaagaaattaaagaatgaagaaatactatattctatactaagaactcagacaaaatattcttaaggtacgagcattaaataacacctcaaaggtgctttatttgccatttgttattttatagattaaaacatgcttcccataccggaagagagcctcctatgtttcaaatcagtgcctacttcaagccttaaaatgttatcacaaaacttaagctgctcctactatgttataaataaaatctagagaactttacagaaatccaacatagcagcatgttctgagaaatataatcgctgttgtacaggacaagccccaagttccactatggaagcaagcaactgtatcctaaacaaaaaactccttaatattaagcttctagaatactatctgtggcatgacaattactaaatatgtgcttaatgaataagtaagtaagatccaccaagtgatctcataattggcatatgtaaaaaattttagacgttttaaaaattaaaactactggcatttttcaacaggtgtcagtagctcctggccagcacttcagctgctggtcagagcaccgtgcctaaaatatcccagctatgcagaggcagagattcctaaacagaagcctgtttggcataggatggggctaaggaaggcagagtgatgctaaaattaatgtgggaaacaattagcaagaggaaatcactctaataactaaaggaagccaaaggagcagtggtggatcgactcctggtgtatatctgaataaggagaaagtgtaattataattgccttttaagcctatttttttttccttgataataccaaacttcatccaatctttaaaaaagtcgattaatctgtttagattttgaagattctatattctgctaaatcctttatgaaaaccctgtgcagaaaatctgcatttgataccagagcacaacttagcatttcatgatttgagaatcatttttttctaaagcggcaagcagtttttttcaattgaccctaaaaaattaaagtctgatgtgaaacagcagaaagattgctattttagaacatattcaagaatacaaaaaatggcaatttaagactgtttcaaagaatcaaactgaggctcatgcttctaggatagtatcagtcattaccaatatttcactcattagaaagcatggcaggactgcggttgtgtaaattggtactgtcctctctgaaggacaatatgacaacattttataaaaatttcacttacactttctagccagaacttgcactttcagtaatcaatacaaaagatatacttggagatgcatattactaaagacaaaaccaaaaaaccaaacacgaaaaaatcctaagaaaacttactaagcactacgtgttttatgtatccaacctcttcatgactgtcctacagaagtaaattactggcccattttagagatggagaaaacagatgaagataagtaaatgtcactagtatttaatggaagtggaacttgaacttcagaatccacacttctaactacaacactatgctgccttgccagagcagaacagaacattcgaaataacctacttggccatcaataagtgatatgaaaaattaataaacccaaacaacggaatatagtcggtcctccttatccatggcttcttgcatccatggactaaaccaacccaggatcaaaaattgttggagggggggacaaaaaaacacaataataaaaaatactactaataaaaaactataacaactatattaactattaacatagcatttacattgtaatatcataaatggagatgatttgaagtatatgggatgttagtaggttatatgcaaatactacactatttcatataagcgacttgagcattcgtggttttggttctggaaccaattcccctttaatatcaagggacaattgtacagtacaactttaaacaagaatacaacatttgtactaacatggaaaatctccaggttaagtgcaaaaaagttggagttttaaaaaagaatgctctttctctatatatttacgagttcttgaataagcttaaaatacctgtggcgtacacatgaaactggtgatactggttacctctggaaagtaggtatgcagggcaagtgaggcctacctttttgtactgtttgatatatatatatacatacacacacacacacacacacacacacatattttaactcgggacataaatgtacaccacctattcaaagtaaaaactactatctcagaagtaaagacataatcctgctattgtcattaactagcagttaagctgcctaacctttatgcagttcagtttccctactatgaaaacctgaaaggttgaaatctggtggtttacctaacctttgaaaacgtcaatacctaactcagatcagaacggagctacctcttcaggggagtagggggaaggatctctgaagatatttctaaccctgcacactagaaatctcctctgttttggttctaacatcctttgaccaagagttttacaatcagacagtcgtaggttcaaattaagctccctctttgctcagttgttttgtaacggtgaataagttacttctcaactataaactgggataatattcatcaaaaaagattatgaaaattaaatacaagggcacacctaacatagtgccactgctgatgcgaaaagtaactctgaagacaatcttgcagcaaaacattaaccagccagtataatcatgcctaacaactctggtttgacatttaaactaaaaacacaaccttatttctcaagaattagaaaatttccattctgtaccaaactgtaaaagcgtttcttagaatttgtatgtttcacaaaataattcaccagaaattcttttgtaattctgacttgtgtataaaaaaaagcactatgtctattagttatgcactgctgtcacctcaactatacaaactgttaacttatttgaagatcagatatggcgtatgtcctcatcaatgcctttccaaaaataattagttgcctccgacattaacaaaggtatttaatgacttcacgatttgagaaaccttctcctgcctgtctccaaaattctatagactcgcactgcccgctggcatttacacccaatttaagaaaatagaaatttttgcctgaaaaccaattactcttctaaccagtataatgacaacaaagattaactttcccttgcaaaaagaagccgataaacacaagcctttcccagaaactcttcgcacaaacgctgttttttttttcacgctgaagacactaacaaatcagagtgaccaagtaaatcccccagggtttccctcttacaaatttgaagaaggccgctaagtctggcagcacaacccgacagtgtcaccccacactatcaaagcggatcattcgcaaaaagcctttttcagcgacgaaaagggcatcaagcatttatcagaaacacacacctcccccagagcgtctctacaacacccgatatccttaatcactttaaagaatgatcagaaaagttcaggggaaaaccaattatgcaaatatccttggaaaaagaagcaacttccctccgtctctttttccacgcgtctgtgaaatattcagcattcccaacgtaaaaattatctttttaaaacgggagggcagcagcagtcactggccgaggggcacccgccgaccccccgccccaccccgcccagccccaccagctccgcactttcttgagccccgcacccgagttcggcggaaggttgctgctcccggggctggcaccgcgggcgccgggcccgccaccgcctcctcccagacagccatttttacccgcggagtaggcggcccggtccccagagcgggctcgttcaaacctcctcccctccctccgcagcccagggtttccccggcctcctgggggacgtgagatggacctgcagggtaacagcctttgtagatctcagaatggatcagaatcatttgttaccgaacaagcgatgatgcgggcccaagctgcatgggtccgggccgagggcgggcccggggcgaagggggctgggcgggtggcgccgccgcttgggcgccgggagggtggcagcacgcgtgggcgcggcgagggctgccttctccctcgccctcccgcccccaggagtccggctccccgacggcagagcggcggggaaagggtggggggagggagctggaggaaaagaaggggtcggccgagtctcttaccttgctctccgctgggagttgggcgggctgggtggcccggggaggggaaaagggtcgggggagggggtggggaaaggggggagcccttgcgaggtgtagcttccgagcagctcccgccgccgccacagccggcgcctcctttccgattcactcaaacaaacaagatggctgccgttacgccgcggctcttcctgccgcccaaatcctcggttcaaatcggcaggatgtttacggtcaaaatggtacctgtgcgcctgcgcagccagcccaagcccccccctccccccagaaggagcggcgcaggcgcaatgactatttccttttctttggaacccgccctctgtttgtggagtccacaactgagcaagcgcaaaggtgattctcttgcgagggtctttgagagttgcggtgttagccaatagcgtaagatagcgcacgcgcagtgctttccagtgcggtgaatatttgcgtttagctttattcttgtgcttgttttaaagaaaaaagctgtcgtggtgcaattttgtgtgcccccaccaaaaaattcattttatggctctatagggatgaaagtaacataaaaacctcaaactaattccataaaatatagaggttcatttattcagtcaacctatattatagagggtcttctgtttgctacacgttgggctctggatataatgattaatataacagagataataactgccttttggaaattttcagtattgcttgggaggaatcttaaaatttcttatcttaaaagacttacttgtaccacgaagaaatttacttttgtttttattgtagagatctttccagtgatgaaagaaattgaagaggacacacaaaaatggaaatatattccatgttcatggattggaagaatcaatattgttaaaatttccatactacccagagcaatctacagattcaatgtaatccctatcaaaatatcaatgacattcttcacagaaagaggaaaaaaatcctaaaatttatatggaaccacaataagaccaagaatagccaaagcaatcctgagcaaaagaataaagctggaggcatcacattacctgacttcaaattatactacaaagtgatagtaaacaaaacagcatggtgctggcataaaaacagacacatagactaacggaacagaatagaggacctataaataaatcaatacatatacagtcaactaatttctgacaaagctgccaagaacatacgttgggaaaaggatggtctcttccaaaaattgttctggaaaaactagataactatatgtagaagaatgaaacagatcactatcttttgccatattaaaaaaatcaaaacaaaatggcttgaagactggaatctaagatttgaaactattgaaactactagaagaaaacgttagggaaatgctccagaaccaaatatttcttagtaagaccttaaaagcataggcaagcaaagcaaaaatggacaaatgggatcatgccaagctaagaaccttctgcaaagcaaacaacaaagtgaagagacaacccatcaagtgggggaaaatacttgcaaactactcatctatcacagaattaatagccataatatataaggagctcaaacaatataataggaaaataatccaattaaaattgagcaaaagacctgaatggttatttctcaaaaaagacatacaaatggccaacagggatatgaaaaaatgcttaacatcactaatcatcagagaaatgcatatcaaaactaggatgaggtataatctcatcccagttgaaatggcttttatccaaaatacaggcaataatgaatgctgataaagatgtggagaaagagaaacactcgtacactgttggtaggaatgtatgttagtacagcactgtgaagaacagtatagagattccttaaaaacctaaatatagagccaccatatgagccagcaatcccactcctgagtaaatacccccccccaaaaaaaaaggaaatcagtacatcagagtggtatctgccctctcacatttattgcagcaagattcacaattgtcaagatatggtatcaacgtaagtgtccatcagtggatagatgggtaaagaaaatgtggtacacatacacaagataatatttttcagccataaaaaagaaaaaaagtcctttcatttgctgcaacatggatagaactggaagacattaagtgaaataaaccaggcacagaaagacattagtgtgaatgttcacactaatatgtgggagcttaaaaaaaaaaaaaagaactcattgagatagaaggtagaatgatggttaccagagcctgggaaaggtagtggggagggggcagatgagtacaaaatctgccccctcagatttggtacaaaaatacaattagaaagaaggaataaagtctagtgtttggtagcacaatagggaaactatagttaataacttactatatatttcaaaataactaaaagagtggaattggaatgtttctaacacaaagaaatgataaatacttgaggtgatggataccccaattaccatggtttgttacacattgtatgcttgtattgaaatgtcagacgtaccttataattgtgtacaactattatgaatccataataataaaaacgtattttaaaaagaaattttgtgtccagtttctgaatgtattttcattttaaagtaaaacacacaggaaaagcagacatttaagtccatatactcctcattgtcagcaaccactacttctggacacttccaggattttaatgacacacagaacacctcacttttacccttcttatgctgatataggagatggataagaaagtggacagtcttgtgctccactcactgtgggtccactgtttttgggttggggcaaggttcgtctcactggctggagtccattagctaagtggccatactggccacagctcaaagctttatcaagtgaatttctgttgtagttagccaaatattttatgttcttttggtttgtttttaatggagactttaagaaattggcattaaggatagttgttaaaatcccaagctggggagtgaaggagtacaagcacttttaacattttaagcatgctttccctcgaccaatatagattagatgctcaaagcacttaaatccttcctgctggtgtggctttaagcaaactcaacagtggcagttgttgcatcatctcaaaaaaaaaaaaaatacaagctcattaacaattaaactccttgcaacagaaattagatttctgccagtgaacaatttaattcttcacttcaaaataatttcggtgtatcagctgctaaatgacctcaaaactaatcatgtgggaaaagtctcctgtcaggttaagaatcacacaaccatgttgcatggtgaagacgttgtcgttcatattaaatttcagtttaaatcaatcccagcttcaaactatggccaggtgaatatgcattgccacttcttgtctctcttatattacattagcttttagagtttttgttcatggaaccatatatttttcatctgtatttgaataaaaacaattctcttttcctcatttctagcagcaagtctgattctaatatttaaatcaacaggcttacctttttcttaagacatttatttttctacttttgggggatggttatgaacatgggctttgggttcaaattcttctcttctacctcccagctgttttaacatgtacaattaatgtctgagctttgatttctttattaataaaatgagggtaatacttgtcatgatgtttgaaataattcaataggatcacatacacaaagtgcttagtatagtgcttggaactgagtaattaataaatggcaggtattactctagttttatctgctttctgaataataagatatcaagcaaggtatgggaaatatttatcagatattcaatttataagaacatcagtaaacaccgggatactctgccccattctgactatatcctgttttatgtttatatttgaaaattattctctctctctctctgtcttctctctcctctctctctctgtcttctctctctcttctctgtctctctccatctttctcttacatgctgttctcctaccccaagttacctcccaaagtactacatttcttttctcttgaactatttattcttactcagagctcccaactctgagcccgccttcccatttgtagattttaatatagtttcttcacatacagtcctaatcccctaaatggctggatttgattctttgaacaagttgtatgttttattctggcttggagtctcctcttatcaacatacccatccacctccttgtattaaaatgtcaagttaaatttcttattgcaggagttagctgcagtatctcttctccctggaaatacttatctgatgaatgtgcatttgtcaaaattagtaattgtgaatttgtttgactaaaaccatgagaggacagatttcagttacagattttgtctttcttcagttgcaaatggtatgctttccttttctgattagtcagttgatgacttgtatgatttggggaaatcactgagaaactgggtgttgccactgtcttgagtatatctataaaaacagctgcgttctgtctatatcacgttattttatgatgacaccccccccacacacacaactgagagttttttttgtgagataaaaactgttatggcaaaaaaagagagaaaatatactgttatagaaaaagatgataaaacttacagtagcagatttgtttaagatttacatatactgttgtagacttgctcctctgaactggcaaacttttaaaacaggattctctataacattaaaataattatagaatcccagcactttgggaggccgaggtgggtggatcacaaggtcaagagagcgagaccatcctggccaacatggtgaaaccccgtctctactaaaaatacaaaaattagctgggagtcgtggcacatgcctgtagtcccagctactagggaggctgaggcaggagaattgcttgaacctgggaggcagaggttgcagtgagctgaggtcatgcactccagcctggcgacagagggagactcgagtctcaaaaaaaaaaagtattattattattatagtaagtaggaggaattaggtgaagagaagaataagacaagaaaatagatatttcaatgttcgggaggatgggtattaaacatgtggtgcaccaggtttttaaaaatttttatttaaataaaaatcaaagtataaaatatgatgatcaaagaaaagttcagaaagagtgaatagcctttttaaggttttgggctaagcaaagaaaaatggactgaaagtgactttaaaaactgtagattctggctttccttctagtgccaacagtatccttacaaggggttttggtcaaaaagggaatgcattttaaggacaaaattcaaggaagaaatgtcataatcagacataaacattatatgagatgtaggggaattaaggacaaaatgtcattatttgaaacaattcctaattcactagatattaattaaattagtgataatagtgtgtgcatgtgtgtgagagagagagaaaaagaaagagagagagaaaccgagagaaagagttttgtaagccttagaaaacataggtttcattcacagtcacatcctcaacttcaagcagaagctgaggtttgagttttaacgtttgagctgaggtttggggtttgaggcaggactccagaaagcggctgcaagcatccctattatggctgggctaagggtctgctcacgcaggtatgtatcagcagtggaaaatcaccaggggccaggagtgggcccagggataatagggggtagtctctgggccagatggaaatgtgagtttatcaaggaccgaagtggagatgaggggaagcctcagaggcagaagctgggtcaaggtcttatgttaatcacttggacttctctcagaaaatttcattatgctaatatttcaatactgggagcatttttaactctagctgggaatttttctcagtgagtattttgatgcatttcctctattttaaagcccatcatatcttccacaattgtgccgcatctttgagaataatgagtgctagctggataggtagtgtgcacctgtagtcccaactactcaggaggatggcttgagcccaggagttcaagtccagcctgggcaacatagcagacccccagctccaaaaacagaaagaaaaaataatagttgctttctaaaagcagaaggttagtgtttattctgaaatcccctcgccattccagaatgcagacatttttgttttaatacaatatacattgttcctttgattctgtgaaattgcttggaaaaattattgggaaaactcaggaaaaatagggttgagatagatttcttaaaaccaatgcaactaacaaaagtgctaacaatcctaataaaaattattaaatatatgttaaattgccaccaatcaaggaaataatatagcaaatatagtacttttaccacaaagaaggtgaaagtgcttggagagaagggtgtaacaaaaggtagaagttactgagttatgagaaaagagtcaaatgcagagattaagtgcttgctgcagtaagcagtccaaagacacaacatggagataaagtgagccaaaagctaacttgaagtgaatgggcactatgtgcagtcctttgttctctgtggctagatgctcagctgtgttaatgtgttttacatgaacttgatgggatcaaaaaattaatgtgctgggaaacacaaagttacaaaggtaacttccatgccgtttggaaatcattcccctatttgttaatgacatatgaggaattagtgttattatagaaactcacactgcaacttagtacctaagactaaatttggggttttattatcagtgagatctgatatatttatggtagggtggtagagagtgatatttctccacttataatgggctatttaccttggggtcttggctaaatcaggttaaaatttagtagtttggggtggggctggggagtctgcttttttaacagcttcaggtaattccaaggctgccactatggggaccacactgaggatttttctttgatttaattttaaatcatgtttaatttatttttattttcttttatttattttatattaatttctttatttttattttgtattgttctctaaccctcgtagatgaagaggatttttgaaaaatagactttggaatcaagtagaacttggtttgcatcatggctcttctatctagtagctgtgtaaccttcagcaagttgcccaacctctctaaggctgagttttcttatttgtaaaatcaggttaattgtatctaccacctcagtgctgtgttgtttatgtcatgcaatgatgtatataaagcatctagcatagtgtttagcatgttatgtgatctcagtaaataatggttaaagagcatcactcttttgcccaggctggagtgcagtagcaatcacagcttactctagcctcgacctcctgtctcgagtgatcctcttgtctcagcctcccaagtagctgggactacaggcatgcaccaccatgcctggctaatttttcgtagagacaaggtctcaccacgttgcccaggctggtctcaaactcctgagctcaagcaaccctcctacctctgcctcccaaggtgctgggattgtaggtgtgagccaccatgcccagctctaatcacacactcatttgcctcaacatatttactatttttttcctcctgaaatgtacttattctctcttttctgaatcgatctttattctatgctgagttctatggcaaaagctgagaattgtttcccaacatctttgttttttttttagttttgcacatggcacccagctaaatgattacattttccagtgtctcttgcatataggtgtggccaagagaatatgttttactcaaattttatgtgggcattactagaatatatctacaaaatggagcaacctttcttctcattctttattttgctgcttggaatatagataaaatggctggtgctccagcagcattttgggcaatgaagacaaaggataagctaaggatagtaaatcagtgatatggacaaatctgagtacataacaactttgtaaagctgtctcataaacccgcaactggctacctccagacttattttatgtaaatgagaaataaagtcctgtcttgattttttttcctgttatatgtagcttactctaatcctcactgatacaagcacttacctggttcaaagaaagatgaaatacagggggcacaaaagttaatgtctgatctctcctggcgagtagttcaaccttctatgtcatatcagttgtctttcacagagtactattttataacttttttgagagaattttccctcctataaacttcacttccaaatgctcttcctcccttattattcttttattttgatcactctggtaagtctcccacaaaatgtgttcttccaagtctaatcacacattccattcctcttaaaaacataaactatggggaagagaatcaggatctgtaaatcaatatttgtatggccagtttatctaatgtcttttattttcagagtcagtaccttcacagttgaaaaactgaatttacgtgtttaatctcaaaacttgcagttccctaacatctggagacttttggcttcctgacagtatgcatttcctctaaaggcagcatttcattttatctgaaatggttagtctttgataaatttaatgaatcctggaaaactctctattatctctctccaagatgctgcccttaaaaccaaaaagcatctctctttgaccatgtcaagtccatacagggcagttgttgaacatctcaataaaatgatcaggatatgtggtgggtggatagaattttctagctagcacctttcctctttgatacactattgagtataggtaactatagcctttttctctgaatgttccagaatcaatcactcctcattggctaagttgcatctgttataaaacttttttcttatgaactgtgcacttcttgtctgaaattaactggattcaatttatgtcagtgttacttcaaccactgatagaattttaagttgcagaatataagtttttgcactggatgaactctttgtcaactagatagtggaaggtcaggttaaaagggatgatatttagcaattattatttattttttatatgaaaatggcatggtggttttgtttttaaagaatggccttatgcttaaaagatacatactaacatagttacaggtaaaatggtacattatctgggatttacttcaaaataatccccaagaagtagaaaaaggagtggatgtagttcaaaacaagattggctgtgggttgatagttgttgaacttgggtgatacatatatggagggtcattttaatcctctttctacctttgtatatatctctctttacctttgtatttccataaaaaaaggatttagaaaagtaagataattagatggagatatgaatactaattttaataatttaataatgggaatcttcaataagcagatttctaatgattcatagaatattttcaatccgcatttggagtttatcagtgcatatttatatgcaaccatccagttctatgagttattcatctgatatattcaccaacaatgtatcaataggaatacgatttctcattcatacaaccagctattagcacacatgagtgagtttatccactaactcactaggggaagacaaatcggggtgaaatctaattgcttttctaagcaatgcatcggttattttctatggtcatctatattttatattgctttcctagtgccataattcatttctttagcatagtgaggccatgagtgtcagtggaaaaagtgggtcatgatatctgttatggctctaaagattcaatgtcagtcttcatctattcatcctgaggtgaactctgacactccctatgcctgtttggtagccatacctcatttattcattcattctacagcatctacttaataattataaaatgcacctatcttcaatattttaaaacctttccctttgctccatatccactgcaccatttatcaactcccccttacagcaaaagttctgaaagaaatgtccatgttttccctctctaattccttccctttcataatctatcttttttattacagtacaaaacacatagtataaagatcaccattttaactgttttaaattgtacaattcaggggcgcttaatacatttacaactttgtgttacagtcaccagcatctagttccagcacatgttcattaccccaaaagggaaccctctacccattaagcagtcccttcccatttcctcctccctgtagcccctggtgactacttttctatggattgatctactgagtatatttcatataaatcgaatcatacagcatgtggttttctgtgtctgaattctttcacttggtgatatggtttggatcagtgtccctgcccaaatcccatgtcaaattgtaatccccagtgttagaggaggggcctgctggggggtgattggattgtgagggtgcatttcccccttgttgttctcatgatagtgagtgaattctcatgatatctggttgtttaaaaatgtgtagcacctcaccctttgctctcttcctcctgctccagccacgtaagatgtgcctgcttccccatcaccttccgccatgactgaaagtttcccaaggcctccccagaagccaagtagccaagtagatgctgccatgcttcctgtacagcctgcagaaccgtgagctaatcttcttttctttattaattacccagtttcagggtatttctttatagcaatgcaagagtggactaatacacttagtgtaatgttttttagattcatccacattgcagcatgtgcagcatgctgctctaaaatatgtaacattttagtttcatccacactgaagcattgttttttcatggctgaataatattccattaaatggatctaccacattttgtttatgcattcattaattcatggacatttgcgttgtttctactttttatctactatgaatagtgttgctaggaacatttgtgtacaaaaatttttgtttgactatctgttttcagttctttttggtatatatctgggagtaaaattgctgtatcatatgccaattttatgtttaacttattgcagaacagccaaactcttttctatagcgctgaaccattttacattccattaataatgtatcagggctccagtttttcacatgctcaccaacttttattactttctgttctttaaaattaaatccatctcaggccaggtgcggtggctcacgcctgtaatcccagcactttgggaggccgaggtgggtagatcacctgaggtctggagtttgagaccagcctggcccacatggtgaaaccctgtctctactaaaaatacaaaaattagccgggcatggtgacacagcctgtagtcccagctatttgggaggctgaggcaggagaatcacttgaacccgggaggcggaggttgcagccagctgagattgagccactgcactccagcctggatgacagagtgagactccatctcaaaaaaaaaaaaaatatatatatatatatatatataatatccatctcagtggatgtaaaatggtatctcattgtggttttagtgtgcattttccaaatgactgaataatgttgagcatcttttcatgtgcttattggccgtttgtatgtcttctatagaaatatgtctatgcaagtcctttgcccatttttaattgggttgttagtcattttattattgagatgtatgagtttttaatatgtttaaaatgttagacccctatcagattccttatcaaatatattatttgcaaatattttctccactattagtcattcttgagaaagaatagcacaaacttaaaaaatttaaatattctgaattcaattgtgtgggttgaaagtatataggttaaaagagtagtttgtctatatgctcactgttagtagaagtaaaaaatatttcaaactcttgagctgtaagcaacagtggagtctacttctggtatccaaacacttccccaaacattaaagcatttagatgtacaatttaattctcaggctgatcttcaaaatcatgtcttggagacacaattaaaatacatgttaattggtttaaggaagtctaccctaatagaagttcaatttctttgagacttttctgatttttggatctttgcaaaataatatatgataattaattaatgtgctagattatttggccttacatgcctgacattccaccatataagttaatttagtttagaatgcagtaagctcctgacatttgtgacaaaaaagaaaccccatgcagaattcctatgaacctcctagaaatgttgtgtcagtcagggtacagtcaggagatagaaactactcagtaacttgaatggaatatttcaaatataaagaattattataatgaactaagaattaattaataataggattaactaagaagcaataaggagaacgctacagaatacaatagtagcagatattggaagtaactattacctctgtagctgaggccaagtacccattgagggaaaagacttccaaggaggccaacattgagatctaaactcctatatggagatggtgtggcccagttcatggcagataaatttgctgaggtcccaaaggtcaggggtggctggaaactgcctgttggggttaccagtgaactaactgggaatcaggcctctggaatgctggtgaaactcactggaaagccaccctctaaggagctaacaagactttacaggggtgctggcaaaacttgctggagcatgaatgccactgggtgttccacacactgctagctgtcaagtgctatgggagcaaaaaggcacacaaaaatcaggaaaagtcccttcctcctgcaatgtccctcttctgccctctgttgacaaagcctaacattgcaccctctgacaaaagagaaacctttacgtagtccagctcctgtatcacaaagcaagacaaaggttaatctggaactgggatgctataaattgataagtggcacagatagtgatttgtgattctttgagggaataatccagcaaaaagatggtttatgaggaaagtttcagaagtggttatttacacagggtagcagtgtgattacttagaagacaaaagcttaataatggctaaaccagaaaacctggtttaaattaaacaattaaaattattttaatttcaatgatctaattaaaataaaaaacagataaacagatatgttgaggataatctgaatctatgagccaaaaaatctccaaagcagagaattctcttaaagcagatcccaaagacaaggtcaaaggtaggtcctatactatcaagtgagaattgataccacatgtcctaggtaagttgttctatgaaatgacgaattgcagatataagcaagcaagtgactttatttgcttgttttgttttgggctgctgtggtgaaggagccatcaaatcagagtgggtatatttttgaggatcttgaaaaaataaaaattcctccttttagaagtacatcaatagaagtacataagttaggtgctgcattcactgctattactaaaaaaagaaaagaagagaaaaagaaatacatctgttaggaatgctttttgctgtgtgtaataaatgacctgaataacagagatttcagaaataaagaataaacacttttttttttcttttgagatggagtctcactgtgttgcccaggctagagtgcagtggcatgatcttggctcactgcagcctccaacttatgggttcaagtgattctcctgcctcagccttcccagtagctgggactataggtgcacaccaccacacccggctaattttcgtatttttagtagagacagggttttgccatattggccaggcttatcttgaactcctgacctcagatgatctgctgccttggcctcccaaagtgctgggattacaggtgtgagccactgcgtggactaaaaacagttaataatctcatataacaaatgatccagaggaagcagttccttgatttcttcaaagacccacctcttttgcatctttctgctccagtatccttagactactgtcttgttgcttcatggacagaacttggtgtttctcgttctttcaccatttagacaagaagaaggaagaaaggagttaatatgtgcatctgcatttatgagtatcaagctgtttgacagatattaattgaacaatcatgtgtgtgtgtgtgtgggggggcagtgtgtctggctgtggaatttaataattagtcaaagcatgtacaattttggccctttagcaaatcttacagatccaaacatgagacttcgtcctagaaatttctttttcaccttatacatgcctgattacacagagggtcattccccaacccctgcacactcatagcaattcttctgctctgaatcttcctggtgcattctgggagttatcctacttatttatacttactacataatatattgaggatgacattttatgtaacagatttttttctggtgccataattctctaatataaaatccttaaaaacataatatatattggtaacaaagattttattctctttctctagtctccctctctgctaaatctaataaatgattaaataataggaaactgcagttcttaaagggcagtctctttgttgttaggatctgatttccatttgagcagtggaagatttaatgttgcaattgcaaagagagaatctctcttttattaacttttatacaatttctcattatctaatttataactttgaagggactattcattccttctgtacttttttggaccactttttaaaaacttatgaaataactctttaaataaatagaaaaaacacagggtcaagtgcagtggctcatgcctgtaatcccagcactttgaaaggctgaggctgaggctggtggatcacttaagctcaggagatcgagaccagcctgggcaatgtggcaaaaccccatctccaccaaaaatacaaaatgaacaaacaaatagccggttgtggtggtgcatgcctgtggtcccagctactcaggaggctgaggtggaaggattgcttgagcctgggaggcagaggctatagtgagctgagattgcactcacaatgaaacagtgtgataaaagtacaaaaaattaacccatgtattgtttaataactttgcattgctaactttcaaatatttctgaaagaaaacatatcgggcctattcatcctctgctctctccaacttcatttgctttctacattgtgaaatctcctgtttccagatttagttcttcagagaagcagcctgtccttggcttgtctgtttgatgttatgtaaataatggatagaattttccctgtccatgttttttctgagatggttttctcaaaaaaatttccatttcaaaagcaaactccacaaatacacaaaaaataactaaacatggaaagaggtttagttgccttagattgtgcaaaagactagaagtaaccgccagattctcagcccctgattgtcccaaatcacacgtcatcaactgactaaccagaaaaggaaaacaagccagttgcagatgaaagaagatttgattctaatacagattgtaaacccacaatgactgttttataagcaaagagtcacttttgtgactgaatttgagttttccactgcaatgtttcttgaaaattcctaaaatatcatacattatacattatgccaaacactcaactattgagcggcaagattttattgtttttgggaacactcttaacaggcattggtaggaaatgcaaagaattccagaaacagagctggactggaaagaacacatttatcattagttccataaatctatgtttcttaggattagaagaggaatttcttggactgagtaggttttaaatattctgagccattggcagagggagctaggattgttctgtgatgttgtgaaatacatatttgatcttcattccatttcctggagtacagctcctaaaatccttggaatctcctgagtgataagagttttttttctttgtatgttactgagataacagtggctaagagcacctaggtagtttcaggatgggggtcactggaaagaccaaggcatgattagagagttgggagtttcagcctccccaaccctactccccaatccctgcaagcagcagagaaaggctgaaggttaagttgatcaccaatggctaataatgtaatcaatcatgcctatgtaatgaagcctccataaaaacccaaaagaatagtgttcagaaaggcttctggattgctgaacacgtggaggtgtctggagggtgatatgcccacagagggcatggaaatttcactttcctttccacatacattgccctatgaatgtactctgtctggctattcatccatatcttttgtaatatcttacagttcattttgtttgtgggatcatataaacttgggcttgacttattgttgtcattttattttcctgatactttgttttcttgttgtgaaatggggatacaatactttattagttggggctcagttgtaggtgacaggaaacattaggataatcagaaaagaaagaggttaatcatggggaagagctggttttaggctatgtctctgggattgacttccagaatgtcaaccaagaaccagctcaccaaagaaagggctacctctgcaaccttcagaaagctggggagtcaggaagacactatcccaaactcttgattccagcgtcagaccaccttagctatgaactggagtaagaagctgccaccagcattatagactcagagtcacatggtgcatacaaatccattcaagcaaaatgtatgtcactggcatccctactttccttccttttatttactgattaatgcaatacatatttactgaattgtagtaaagaagtaaaatatgtaatacattagaaagagataaacgtaatacattagaaagggataaatgcaatgacgaaaagtagtgtaggaaatgggattacagaaaattgacagcatcggccttagtctgttcgtgttgctataaaggaatacccgaggcttgataatttatatatttaaaaaagaggtttatttggctcatggttctgcaggttgtacaagaagcatgatgtcagcatttacttttggtgagagtttcagactacttccacttgtggcagaaggagaagtggagctggcatgtacagagatcacatggtgagaaaaaaagtgagagagaaagaaggaggtgtcaggctctttttaacaaccagctgttgtaggaactaatagagcgagaactcactcattacctagaactcactcattacctcaaggatggcaccaagccattcatgatggatccacctccatgactcaaacccctcccactaggccccaccctgaacattggggattatatttcaacatgaggtttagagaggtcaagtatccaaaccatagcagagtcaaagaagacctccttcagaaggtgatatttatgtgaatatctgaagaaggtgagaggacgaaccatgtgagtctttaggggagaagtgtccaggagagggaggagaaaatgcaaaggctctgagacaggagattccctggaaggcaagcaaaagcaaagaggccagcatggaaggagtggagtgagtgagggaatgagcctgctgtcagaaattcacattgatttcaaagtagaaatttcctaagtaactattgcttggttttctatatagacagtgtataagtattttaaactaaaatattcaaagattttgatataatttaaatgaatatatgctcctttaaatgaaaggacagagctaccaatatcactatatttgaagctactgttattttaaataataatccgtgctattaacaatgtcattatctggtttggtttttctttttcctcttttggagacagggtctcactctgttgctcaggttggagtgcagtggcataatcatggctcactacaacctccacctccctcccacctcagcctcccaaatagctgggactacaggcacatgttaccacacccagatagtattttttgtatttttttttatagagacagggttttgtcatattacccagggtggtcttgaactcttgagctcaagcaatccacctgctttagcctcctgaagtgctgggattacaggcatgagtcaccatgcctggccttttttcctttttttataagactttttttaatcataaaaaaaagtctgtctttgatgtgactttttcatgtagaattaatgagttacatgattgacttctaccttttgaaagattcttacaggcttcatttttataatagcacagttataatagctgaaaaaaatctgagtatagcttgtcagattcatcactgaaatatgttttaagggtgcggaataataagtaggctggctttgacacactgctttttttcaatggaaggctaaaagtgagaaaataaactcatttctgtaggagatagagatttacatttgttttcctttgacaaaatactccattctcacacattatacaccattttaagaagattagtatttgtctgagacaaagtgatcttagactttcagtttaaatggtggcatagaagcaagctggtcttactaccccacctccttgccagaaaaccaaaaacaaatatacagcaacaacccagaatcaaatatgaggatgagacagatcctggggacacagagaaatgagagtactttgagcagatggtgggagaatcagactttcacatccatgacaccccatccccccattctgcctggcaactagcacctggaaaatcttctccaactcatggtttctacaagggaaggagtgagattgagatggccaaccagcttttctaccatcttggatatcttgggaggagacctgttattgtcttaacccaagggaagcactgtggctgcctgaagggagaaacttcacagaggacaggtgaagacaaaggagggaagtggaactaccacccccagccctggaaactctgctctgcaacttggcaaaagaagacatcaaatcagaatggttgttcaggagcatcacaccatagaaggtacgtttcatagtttccttgggtgtaaactcctagctagccttctaacagtgccaggtccctttaggacctcacccattcaaaacggacatcactctgatcatttaccaaagccaaggtgaacctggacttaagacacacctagggccaaaaagaaggctgcaacatagtggtaaagattttctaggcaaatatatccactaaaaaaacaaaacaagcctgtcagaggaaatttgaaaaaataattaatccttcaatacaaaggcatagatgtatccaggagggaatggaatgacattttcaaagtgttcaaagaaaagaaaatctgccatccaagaatattgtgcccagccaaattattcttcaactatgaaagagagataaagtctttcccagacaagcaaaagttgagagaattcaccaccagcagatctgtcttacaagaaatgctgaagggagatcttcagtctgaaatagaaaaaaaaataatgcacaaaaagaaaacttttcaaggtgtaaaacccactggtagaattaagtacgtagacaaaccaagaatactctattcctataatggtggtgtgcaatctactcacaactctgataataaagcccaaaagacaaatctgtcaaaaacaataatagctacagcaacttattaaaagatatggaatgtaaaaaatgtaaattgagacaactaaaactcaaaatatgagggtgatagagttaaagtgtagattttttcgtatgtgtgttttttgcctttatttctggtctttattgtgtgatctaaggtaaatgtcatctgtttaaaataacttgtgatatctatggtttttttttgtaagcctcatggtaaccatgcaaaaacctataatagattcaccaaaaataaaaatgaagaaattaaaacatactaccagggaaaatcacttaaacatggaaaaaaaaaaagactgagaaaggaagacagtagtctcaaaacaaccagaaaataggcaataaaatggcagtagtaagtccttacttatcaataacactgactataaatggtctcaattctccaattaaaagtcataaagtgactgaattgataaagaaacaagacccaactatatgctgccttcaagaaactcacttcacctataaaggcacacataagctgaaagtgaaggggtggaaaaaatattccatgcaactggaaaccaataaaaagcaaaagtagctacacttataacagataaactagagtaaaaagctaaggttataaaaaatcacgaagaagttcactatataatgataaaggagtcaatttggcaagaggatataaaaattataaatatctatgcacctaacatcagagcttccaagtatataaagcagatattaatagatctaaaggaagagatacactgctgtataataataataggatatttaacatctcactctcagtaatggacagatcatccagacagaaaatcaacaaagaagcaccatggttaaactatataccagatcaaataggcctgactgaaatttatagaacatttcacccaactgctacagaatacacattcttctcatcagcacatggcacatcctccaggatagaccatatgttaggacacaacgcaagtctgaacaaattaaaaaatatgtaaattgtatcaagtgtttttttctgaccataatgaaataaaactagaaatcagtagcaagagggacctcagaaaatacaaaaacacatgaaaattaaacaacatgctcctgaaaaaccaatgggtcaatgaggaaattaagaaggaaattttttaaatttctcaaagccaataaaaatggaaatacaacatatcaaaatctgtgggatacatcaaaaacagtcctaagggagaagtttatggcgataaatacatttatcaaaaagtaggaagtcttcaaatacacaacctaacagtgcacctgaagaaactggaaaagcaagaagaaaccaagcccaaaatcagtagaaggaaataaataatgaagatcagagccaaaataaataaaattgagacaaaatttacagaagatagatgaaacaagaagttagttttttgaaaaggaaattgactaacctttagctagactgagaaaaaaagaagacctaaataaataaattcagtaatgaaaaaggagacataataaatgagacttcagaaatacaaagaatctgtggacagtattatgaacaactatataccaacaaattggaaaacccagaagaaatggacaaatatctggacatgtacaattgatgaatattgaactacgaagaaatagaaaacctcaacaaaccagtattgagtaatgagatcaaaggcataataaaaaacctctcatcaataaaaatttcaagacctgatggcttcactgctgaattttgccaaacatttaaagataataaactaacaccaattctactcaaactcttcaaaaaaactgaagaggaaggaacacttccagactcattctatgaggccagcattatgctgaaaccaaaaccagacaagtacacaagaagaaaaaaataaaattacaggccaatatcactgatgaacataaatgcacaaaatcctgaacaaaatactagcaaaacaatttcaacaacaatcaaaaagatcattcatcttgatcaagtgggattattctagggatgcaaggatggctcaacatatgcaaactaataagtgtgacacatcacattcacagaatcaagaacaaaaaccgtatggttatttcaatagatgccaaaaaagcatgtgataaaattcagcattctttatgatgaaaatcctcatcagaatgggtataaaaggaacacaccttaaaataataaaggccatatatgacaaacccatggctaacattgtactgaatggagaaacattgaaggcctttcctctaaggaatggaacaaacacaaggatgcccactttcaccactttttttcaacataacactggaagtcttgactggaatgactaggcaaaaaaaaaaaaaaaaaaaaatcagtaaatttgcaggatacaaaattaacatataaaaatcagcagcatttatatatacaaatagtaaacaatctgaaaaagatattaggaaggtaattgcatttacaatagctacaaaaatatcaaatacctaggaatcaatctaaccaaagaagtgcaaggtcaatacaaggaaaactataaaattctgaaaagaaatgaaattaatataataattaatattgttaaattgacaataatacccaaagcaatgcacagattcaatgcaatccatatcaaaataccaatgacattcttcacagagacagaaaaaaaaattctataatgtatctggaaccacaaaagaccctcaatagccaaggtaatactgagcaaaaagaacaaaactgaaggtatcacactacctgatttcaaagcttactataaatttatagtaacaaaaacatcatggtactcacataaaaatagatacatacaacaacggaacagaatagagaatccagatatagatacacacatttacagccaactcatctttgataaaggcaccaagaaataaaatggagaagggacagtcttttcagtaagtagtgctagaaaactggatatccatatgcagaagaattaaactagacctctatctctcactatatgcaaaaattcagtcaatatggattaaacacttaaatctaagacctaaaaccatgaaactactagaaagaaacattgggggaaaatctccaggacactggcctgggcaaaggtttactctgtaagatctcaaaagcacaagtaaccaaagcaaaaatagacaaatgggattacatcaagctacaaggcttctgcacagcagaggaaacaatcaacaaagtgaagagacaacttacagaatgggagaaaatatttgcacactatccatctgagaaggtattaataaccagaacatataagaagctcaaactatttaatagcaaaaaaattaattaaaaatgggcaaaagattggtattaacatttctcaaaagaagacatacaaatggccaacagttacatgaaaaaatattcagcatttgatatggtttggctgtgtccccaccaaaatctcaacttgaattgtatctcccagaagtcctacgtgttgtgggagagacccaaaatacccagggggaggtaattgaatcatgggggctggtctttcccatgctattctcatgatagtgaataagtcttgtgagaactaatgggtttatcaggggtttctacttttgcttcttcatttttctcttgctgccactatgtaaaaagtgccttttgcctcctgccatgattctgaggcctcccagccatgtggaactgtaagtccaattaaacctctttttgtttccagttttgggtatgtctttatcagcagcatgaaaatgaactaatatggtaaattggtaccagtagagtggggcgttgctgaaaagatacccaaaaatgtggaagcgacttaggaactgggtaacaagcagaggttggaacagtttggagggctcagaaaaagacaggaaaatgtgggaaagtttggaacttcctagagacttgctgaatggttttgatgaaaatgctgatagtgacacgaaaaataaggtccaggctgaggttgtctcagatggagatgaggaacttgttgggaactggagccaaggtgactcctgttatgttttagcaaagagactggcagggttttgcccctgccctaaagatttgtggaactttgaacttgagaaagatgatttagggtatctggcggaaaaaatgtctaagcagcaaagcattcaagatgtgacttgggcgctgttaaaagcattcagttttgaaagggaaacagagcatagaagtttggaaaatttccagcctgacaatgtgatagaaaagaaaaacccattttctggagagaaattcaagccagctacagaaatttgcataagtagcaaggagcctaatgctaatccccaagaccatggggaaaacgtctccaggtcatgtcacagaccttcatggcagcctctcccatcacaggcccagaagcctaggagaaagaagtgtttttgtgggctgggcccagggctgccaagctgtgtgcagcctagagacttggtgccctgtgtctccgctgctctagtcatggctgaaagaggccaatgtacagcttgggctgtgggttcagagggtggaagtcccaagccttggcagcctccacatgatgttgagcctgtgggtgcagagaagtcaagaattgaggtttgggaacctctgcctagatttcagaagatgtatggaaatgtctggatgcccaggcaaaagtttgctgcaggggcagggccctcatggagaacctctgctaggtcagtgtggaagggaaatgtggggttggggtcctcacacagagtccctactggggcactgactagtggagctgtgggaagagggccaccatcctccaggtcccagaatggtagatccactgacagcatgcaccatgcacctggaaaagccacagacactcgacgccatcccatgaaagcagccagaagggaggctgtaccctgcaaagccacaggggtggagctgcccaagaccacgggaacccacttcttgcatcagcttgactaggatgtgagacctagtcaaaggagatcattttgcacctttaaaatttgactgcctgctggatttgacttccccgcatgggccctggaaccccttgttttggccaatttctcccatttggtatggctatatttaccaatacctgtacccccattgtatctaggaagtaactagcttgcttttgattttataggctcataggcgaaagagacttgtcttgtctcagatgagactttggactgtggacttttgggttaatgctgaaatgaattaagactttgggggactgttgagaaggcatgattggttttgaaatgtgaggacatgagatttggagaggccaggggtggaatgatatggtttggctgtgtccccaccaaaatctcaacttgaattgtatctcccagaagttccacgcattatgggagggacccagggggaggtaattgaatcatgggggctggtctttcccatgctattctcatgatagtcaataagtctcacgagatctgatggatttatcaggggtttctgcttttctttcttcctcatttttctcttgctgccaccatgtaagaagtgtcttttgcctcctgccatgattctgaggcctccccagtcatgtggaactgtaagtctaattaaacctctttttgtttccagtttcgggtgtgtctttatcagcagtgtgaaaatgaattaatacatcatcactaatcatcagagaaatgcaaatcaaaatcacaatgaaatatcatctcattccagttaaaatggtttgtatcaaaaaggcaataacaaatgctggtaaagatgtggagaaaggggaacccttgtacactcttggtgggaatgtaaactagtacagccaatatagacaacagtatggagcttccgcaaaaactaaaaacagaactaccagcaattctaatactgagtatatatacaagaaaaaggagatcaatatatcaaagagatatctgcattcccacattaattgcagcactattcacaatagccaaaatatggaatcaacctaagtgccaatggatggatgaatgaataaagaaaatgtagaatatacacataattattcagccataacaaacaatgaaatcctgccatttgcaacatggttggaactagaggctattatgttaagtgaaataagccaagcacagaaggacaaatatcacatgttctcactcatatgtgagaactaaaagagtggatctcatgaagatagaagattgttggttaccaaaggccaggaagagtgggagggagaagggtttgaagggaaaaaaagaatataaatggagccattatcacttaattgtacacttaaaaatggtaagaatggtaaattttatatgtatattttatctcaataaaaaccccacaaaattgcaaaaattattactttgtaattataagcatatactagcctagggattagaaggaatacatggtggtgggttgaggagaaaactatgccaaagacgtgtctaagagagcagtcttaaaaaaggatttcttaacctttgcattgtcattaggggtggacaattttctgttgtgggatgctatcttccgcctaggatgtttattagcagtaatcctggtatttacgtgctagatgccagtaacatctcccctcagccctccacccctgccctgccctgatgtaataaccaaaaatgtctctagacattgctaaatatctcctgggggcaaaattattcagggctgagaaccactaagttggagtcagaagagtgaaacaattttaaaaattagctgggtgtggtggtgcatgtctgtagttccagctactcagcattgcttgagcccagtagtttgaggctagacttggcaacagctctgcatgctgtatagaggtagagaccctgaaaaaagaaagaatgaaagaacgaaagaaagcaagaaagaaagaaaaaagaaaaaaattgatctaatcttgaaatgtgaaggagacatctcactgcacagaaacatagagaacaactgtttgtaataattattagtttaatatatattttctttgctagattgtaagatgcacgaggacagagactgtaactcttatttttataatcagatcataatctgaaagttagtcgacaggtgtttattgcattgctatgggtctatcaatgggttatgtgcatttgaggcaggataggtagtcaaggaagtgaccatgttgccaggacgcagtgatcgtggtggccatacaaccaacacaggcctcagcgttcgcagtataattgagctcattcaagcaaagctatctgcggtggggacttttccttctagagagcatgtgcacttggattttaccagtcctcaaattggcgctttgctcatttcaatagtgaaaaatacactcctgggtggagatttcagatgctaatgagacacacgatgcatgaacaagcatgtgcagctactgtgcatgtgcacccagaggaccacccagaacatacctactagtaacgcctcttcccaccttcttatgaattattatgtaaaactcccataaagggagtctccctagtgccagtctttgctggctcatccttatgggcagcccaccctgaatcctctctctctcagggtgtcctgtctattctgtacctacctttcaaaatattctttttcttttgcaataaatcactgtatgctgcaccttctttgccaggtgctcttatttaaattcttttaaactaaggagacaagaactgaggtctcacagaaaccatcaatattttggaaataaaagagaggatttagaactgagtctgttcttaaagtgcttcatggcttattttctaattgcttactatacagtagctcttttctgtgctactagataacaaaacctatagtactaaaaaccatgttctttttcaaagaatgcagaaaagagtatgaagtagaggaagtagaggaggaagtagaattaaagttgattcttgatgaatggactagttttcagtgggtggaagaaaaaaatgaatgagggattccggatgtggtgaacagcataagcagagctattcagttaggaattaaaatcattttggtgttgagagcaagcaactatttttttttctcgagtacttactatgtgtcagttactctgttaactggtatgtatatattatttcatttataggactcagccagtgaaggcatgaaagtgttagaatcattttaatggacttgattcaaatgagggtggggaagtataagtaaaagtcaatccaagatattgtctcagctcctggaacagtggttccattgatggcatggctgcttggaaaagtggtcaaaatttattggtaataggaattttctttttgcattttagagctaaaagggggccttcaatgtcatatttgaatctggcaacaaaacaaccaaaaaagatatcctctatgtaataggaaatatgagatcagaatccctgtgagaggacacaggtaaagatgtaagtttggaaatcatctgtcacgggagtggatgaaatggctaaatgggtaaatcaagagaagagctgcttgccaaaatgagagcctcagtggacactacctattagaacacctgacaacaaagagaagatgaagaagaaatcagagaggaaggaggagaaacaggaaagtacagagttgaaaaatatttagaaaggaaatgatacatgattattaggatttcctaccactctgagatgtaaaaagaggcaaagtcagtttggggaattcttcaagtcaagaagcctggttatcttcattcagagaatggaagagctcagcctcacctttcaattctcattggctctgaaacatcataggggtggggtggataagttactttgtagcttttatttctatttgtggctatgatctgggttgtttacactttgtaaataattttacagaaatataacgatattaatgttttgaaaaaggaattgctataggagagcaagtgtggaaggataagacccacaatggaatccaacgtagattagtaatgaagttctttaaacttgtccagcatgacaatgatctagagcaacagaaatgtcttcttggattcattccatgcgagctaacttggcctccgtgctcctattccattgttcctagaacataacactcattgtccatgcacttgctgtcccaatctactcaggaggcttttcctcccaatatctacaaggcttactaactcactctcttcagatcttgctcaaatgttaccttatcaaatcagcctttcctaaccactctttcgaatacagtaactaccatttttaccctagacactccttactctccttactgtgctcaaggaaattaggatagacttattaccatcagatagactatgcattctcttatttatatgtttattgtctgatctccccttacccctgtgcacataccagcaaattatctctatcatgatggagatcttttattttatacttgctgctacatcccccatgttctagaacagttgcaggtactcaatagatgtggaatgaatggatgaaaaggcactatctttataataccgtgtagtggttaggacagatgactttgaagcaatgttgcctgggtttcaatcctggcagtaccactgattctagttgtgtggaaggttagttaacttctgtgtacttcatttttattgtctctaaaaaataccataataaaaatattgtaagattgtttaaagaattaaatgaattatctcatgtaaagaactgaggacagtgcctggtacagagttgttgctctgttaatgttagctatcactattttttttttttttttgagacggagtcttgccctgtcacccaggctggagtgcaatagtgcggtctcggctcactgcaacctctgcctcccagattcaagcaattctcctgcttcagcctcctgagtagctgggactacaggtgcgtgccagcacacccagctaatttttgtatttttagtcgagatgaggtttcactatgttggccaggcttgtctctaactcctgacttcctgatctgcccacctcggcctctcaaagtgctggaattacaggtgtcagccactgcgcccagccttagctatcactattaatgtggttctgtaatgtgactgaaaagtgtagtactttcaaatctggacgtataaatacatgctatccagaggtcagaagggaagggattgttggggccagagaggcagtgaggagctatagtagactgaatgcaagaatggtcaccaccaattccttctaccctaaaacatgccatttctctgtcaagaggtagagtctatttctcctcttcctttaaatctggtctggcaaagagtgcaatggaagtgatgttttgagacttccaaggaagatcataacaaacttcagcatcctatggggcctcttagaatgctccaagtaaagccagtcactatctaaaaagtttaactactgtgaaccaccattatgtaaagacactcaaactagctatgtagtaaaaccatatggagagagagtgatgcaggtcagcccctagctgttccagccattccagtcaaagaacaaggaatgtgagcaaaaaagacatcttggacattccagcctcagcagatgccatagggaaaaaaatcaaggccactgtcttatggccccaatttagtcacctcatccctcttcagccatttgtgctaccctagatgagggcccagatattttggagcagacataagccatatccattttcccccaaccaaattttatatacagagaattgtgagcataacagactgatttttaaatgcaattgtattttagggcagtttgttacacagcaacatgtaatgggagctggagacattcagtttgcagaaattaggaaaactttaaaatgctctttatattatgaaagcaataataatgaagatcatgataatgacaacaacactggtaggcatattttattaaaggtctagtatatcttgggtactctaattactaaatttacttcttataagtttgagtagtgtatgtgtgatggttaatactcagtgtcaacttcattggattgaaggatgcaaagtattgatccttggtgtgtctgtgagggtgttgccaaaggagattaacatttgattcggtggctgggaaaggcagacccacccttaatctgggtaggcacaatctaatcagctgccagcatggctaggataacagcaggcagaagaatgtgaaaagactacatctttctcccgtgctggattcttcctgcccttgaacaccagactacaagttcttcagccttgggacttggactgacttccttgctccccagcctattgtgggacgttgtgattatgtgagttaatactacttaataaacaaactccccttcatatatatatatatgtatatcttatcagttctgtccctctagagaaccctgactaatacaatatgttaatgtagttagacaagtttgcacatttgcatatggtgatggaatctatccaaccacaactcattttgcttgtctccccaccactcacatgtgaggggtcttgtgaagcatatcaagaatttgagactttatgggttttttttttgtttctttttttttttgagatggagtttctctcttattgcctacgctggagtgcaatggcacgatctcggcttaccgcagcctccgcctcctgggttcaagcaattctcctgcctcagcctcctgtgtagctgggattacaggcatgtgccacaatgcctggacaattttttttttgtaattttaatagagacagggtttctccatgttggtcaggctggtctcaaactcccgaccttaggtgatctgcccgtcttggcttctcaaagtgctgggattacaggtgtgagccaccgccccggccgagactttatcttaaaggcaatgagcaatcattaaagaaattgtatcaggttgctggtacaatcatatttgaataattataaattattttggctgcagtgggaagaaatgttgttgcagtggtcaagtagtcttcaaatgattcactagggtgaaatgatgggtttggcactagggtggagataactgagataaaaaaagaagagttgactgatttaatggaggtgggtaagtattggaaagattgtacccaggacaaatttgaaggatttggggttattctccaagtttttattcacatattcccagaaaagtctcaggagttattctatctggcctgggtggcctgataaattacatgtaatttaatttcctttaatatcattctaagacggtaaacttaactataatttttttggggagaggataggaaggtactttgatactttctcatttacccaagaacagggctttcacaggcatggagagggtgggagagagggtgtttgttcttagattcatgctcttataggatgcatggtggcaggtgtgataatgatgtcttaccttgcaaaataaaaggatgatgctaatagttcaattcctagataaaatcaggatagcagaggaggaatcttgtggaagcttttggtttatttgggagggaactgtaattatgaaattgggtaagatggtgggaggcttcctccctcacaccatcacgtttgtttctgtccttttggctcactgtacatggccaggaataatagtcttcaagtgtcactttcaagctatgaatttcccagaaaatggaacatggatgatttttcttgcttagttcagggccatgtgtattgatttgtatctgatcttgaatttttctaactcaaggtttctacatactacaaggtttctaactcaagaacatttttctaactcaaggtttttactactaatagcagcagttgacatttatatagtggtttctctgtgtcagacactgttctgaacacttttcatgtgttaatttaatcattatgaaaaccttatgaggtaagtaccatcatcattcccattttacagacaagaaaattgacagcagagaggctttgtaactaacccaagatcactaggaagcagtagagggtgtatttaaatcctggaactctagcttcatagactgtgctttttaaccaatgggcttaagttggtaattcttactgatttggttaatcacttactgattttgataatcacttctatttcttgagtatttactatattaaagacactttgatacgtagtaagtgaaagtagacactggcactatttagtttctagaaagaaataaaatattacctatatattcttatataggtactattttcaatcccatttcatgagggggaaactgagacttaggggggtttaagtatctgctggtaagtggcatagtcactttgaattgaggtctacctcataccacaacccatgggatcaactgtcagctaatacctatctagcttatagaaatttggttttgccggttgtctctactgcatcctgcaggtctttcctaatattacaggatctcttgggaataaaacaactctttgcctgaagtccaatgatcaaataaaaaagccaatatctcttttaactgtgcaattcaagcacatctagtgtaattttacaactcatcccagattgcatttattactctgatggcttgttccaaatacagactatggagcccatgtagcttgtttcatgaaatataggatagagtgaggagtcttttggttttctaatatggaagtagaggatgccagcaataactttccatatttccattaagacatatttattagtgcttacactcatatagttgaatctataattttataggaaattataataatttcttcatcccagaaagtcaaacatttccaagtagggaagaaaattgactttcatgtaattttctcagtttatttatgctgaagaggcttttgccatgtgaagttttctgagtatggcttagaggcaaataaatctttcattttaaatagcataaaacatctgggaattagttcttatctattaaattaatagttcatggaactccagttttgtggagtttgtcctaaattcagggtagagtggaaatcatgttccctgatggaaaaaacttggctgctaggccaagattggttttgacaaaaattgcagttcactcgttgatttacttagatgattctcattctactttaccttaagaagatgtcttcatgggattcagcgaatgtttttaaacagatatatgaggcaaacaagaatgagttatcagctaatatcacagatagttgattccatgaatagactgtcaggctgaagtgacccaagatgatgagatacttttcaagaacagtcttcagatggtaaaaattagacagtattccacataagtactcccattatagtaaaaacatcaccttttagaattcaaaacaagtggtaagcatgaaattccctgttaaatgctttctgttatagctactctgataaacattttctgtggcgaatttatttcactaaagatttgcagacccaaacatgcattttcaacatacaaaattgttcccttttgttttaaacagagcactgttatcaagatggggtatgaccttcacagaatgaaactgattgattccttctctcattataaacttttaatgatgatatggaagacccaaacccatacgcaaacataaacccaatataagcacttatcttagtaaggacattttacggaaaagaggatggttagctcatctttgttggaataaaaatttaatatttcttaacagtcactgagtgagagtctgctgggagggtagattactggtttcttagaacaagtccgaaacccattaagcctcacgaaaaattgttatgcattttatcaggaagtctaatttcttcccagaggtaagtcttgaataacattaccaaatagggttttatcccataccaggttttggacaatttttcttttatagagataatagggtcttgtatctataaataagcctgattaaaaattaaataagttatttggttaagtctcattaaagaatgtaaatttagctcccacgctcggatatcaaaggtttgtgtttatgaggaaaataaagagagagaatatgtgtgtgtgtgtctctctgtgtgtgtgtgtgtgtgtgtgtgtgcacacatgtgctctccactccctcaatctgtggacacatgattagaaaaactacccttaagcattttgatcacttatggcaaagcaagtgttacaggagcatgttgcaacaaaaccagaaagaatgcaaactggctagccatatgtagaaagctgaaactggatcccttccttacaccttatacaaaaattaattcaacatagattaaagatttacatgttagacctaaaaccataaaaacactagaggaaaacctaggcaataccattcaggacataggcatgggcaaggactttgtgtctaaaacaccaaaagcaatggcaacaaaagccaaaattgacaaatgggatctaattaaactaaagagcttctgtacagcaaaagaaaataccatcagagtgaacaggcaacctacagaatgggagaaaatttttgcaacctactcatctgacaaagggctaatatccagaatctacaatgaaatccaacaaatttacaagaaaaaaacaaacgaccccatcaaaaagtgggcgaaggatatgaacagacacttctcaaaagaagacatttatgcagccaaaaaacacacgaaaaaatgctcatcatcactggccatcagagaaatgcaaatcaaaaccacaatgagataccatctcacaccagttagaatggtgatcattaaaaagtcaggaaacaacaggtgctggagaggatgtggagaaataggaatacttttacactgttggtgggactgtaaactagttcaaccattgtggaagtcagtgtggcgattcctcagggatctagaactagaaataccatttgacccagccatcccattactgggtatatacccaaaggattataattcatgctgctataaagacacatgcacacgtatgtttatagcggcactattcacaatagcaaagacttggaaccaacctaaatgtccaacaacaatagactggattaagaaaatgtggcacatatacaccatggaatactatgcagccctaaaaaatgatgagttcatgtcctttgtagggacatggatgaaactggaaaccatcattctcagcaaactatcccaaggacaaaaaaccaaacaccgcatgttctcactcataggtgggaattgaacaatgagaacacatggacacaggaaggggaacatcacacatcggggccttttgtggggtggggggaggggggagggatagcattaggagatatacctaatgctaaatgatgagttaatgggtgcagcacaccaacatggcacatgtatacatatgtaacaaacctgcacgttgtgcacatgtaccctaaaacttaaagtataataataataaaagaaaaaaaaagaatgcagctgttaacaaaagtatatttcaagccagtaaggtctagttaaaaaatactgagacctaaaagacctgccacacattaaaattgtgaggaaattgattttgccttagcaaaatgataacacatcaatgtaacctgaacaatagaagaaggtaattcatgaggattatctaaaacaagtgagtttaatgtcgtgaatctgatttgttttggaagcagatcattttatttttaaaaatatatatttaatgctatttaaataattttatatgagacctattttatatgagaccttgatttatgttaatctagagtttgacaaaaatacgattttttaagaatgtacatcccagaggctgacaagggattaccatataaagtcacctagggcagggatcatgcttaatttgtctactcagtaggcaattggaagttttgtgttaggtgaacctgttcggtaaaggtgaaaatgtattctgcagttctttttaatctattaagggctaaccaggatatgatactgtaccaaatcatagtcttttgataatggatgaaagaaagaatgtgcttagagttgtgttttacgatttatattttctgcaactagtatgagttactttttacataaaaaatgtgtaaaaatatcttaaacctcaagtttatatagttttggtttaattcctgagttttctcatacatagagataaatactcacatggccttcagactccattcccacactcccagtagttatactagaagaattgtggaactgtggaaggaattcagccagaataaggttgggctagattttatgattctgcaacattcattatatttctagccattttgaagcacataattagtgtgctaagtcctagggataacaaggtaaataaaaccatatccctgtccccatctagcttgcatgtaggcaagtacacatctcatctgaaatacatgtagttagtcctgagtgagtgaatgatttgggatcctacagagctgaaatgatttcgtcactcattccacctcctgggaggcttagaacagactttataaaataagcaattgacttctcttaaactgagtcttgaagggttgagttgtgaagtaaagaagggaggagggatcaatccagataaaggtaaaggaacctgtgcaactgtagccgcccaattctgtgctcttgctggaaaggtgttgagatcatttggaggagaagaggcactctggctttctgagttttcagcgttttttcgttggttccttctcatctttgtgagtttgtctagctttgatctttgaggctgctggcctttgagatttttgtgggaatctttttgcggatgctgttgttgtttttgttgctttctgtttgttttccttttaacagtcaggcccctcttccgtagggctgctgtggtttgctgggggtccactccaggccctattcacctgggtgcctcccttccctggagatatcagtggaggctgcagaacagcagagatggctgcctgctccttcctctgggagctcccacccagagaagcacctacctgagccagtgggaacgctcccctataaagtgtctggcgacctctactgggggatctcatccagtcaggaggcatgggatccaggatccgtttaaggaagcactctgactgccccttggacaagcgggtgtgctgtgctggtgggaatcccactcttccggactgcccggattcctcagagccagcagggggaaagactgagtcagctgatcctgcggagactatggccactccttctgcaaggggctctgttccaggaagatcagagttctgtccttaaacccttggctggagttgctgaaattccagcagggaggccctgcctggtaaggaggtatgggtctggcctaaagaggcagtctggccacaatttgccatagctgctgtgctgcactgtggggaatttctcctgggtccaaactgcccaatctccctggcactggcaggggaaaatggctgacaggagctgcggtgttggctgccacccctccctccaggagctcagtcgtcttagacggactccagcccagcggctgctgagaatctgcacagctccgtgcttgagacccaaggccctggtggcatgggctcatgaggggtctcctgatccatgggttgcagatctgtggaagaagcatggtttcccaggcggggtagcacaatcagtcgccgcctcccttggctggcggtgggagctccccttgtcctgtgcagctcctaggtgaaccacggctccaccctgcctttcctcactctccatgcgccagccacctagtcagtcccagtgagagaacctagatacgttagttgccagtgcaggtcgctcacagttttcattagtctggatgggagcctctgaccccaactgttcctagtcggccatcttggtcctcttagctgttcttttctaaagacctttcgtcttccatataaatgttagattgagtcagtcaagttcctaaataaatcgagctggacttttgattgggattgaattgaatttgtagtttgagttggagtatattgacattattaatatattctttaatactgtatattgtatagtatatcattttaaagatattatatgtatgtatttaaatataaaatgttctatatgcattccatattctgtgttcttcaatattctgttaattcccaggtacttgatggtttttgttgctgctgctggtatctttttttctattatatttttcagctggtcatttgatattactttgtaaataggaaaacatgtacatctaaacaaaatgtttatctttaaaaccaaaagattctctgctgaagttgctacactaggagtgttcattgatgcccaataaaaacagatttttactctaataattgttcattttcctgtaacaagcttgggggattcacagcagagagaaaattataaatttgctgtttgtcttactttctgttgtctacagtagaaagtaagaggatagtggggtataaatcttagataagttaaataaacattaactttccaaaactaatagtaatagtaacacctattgtagtggacaccattggttgctcccatgtcatccattcctctcttcatcttttcatacagaatctcaattgttttcctcacacagctgtgtgcttcaggagaacctgacctacctacagatccaggggtgctcctgattggtttaaagacagcccattctctcgccagtgattggttcaggtatggggaacatgatccaattctggccaattaaattatatttgctgggtggattctggggcaagttttctcattcccaaggaagagacacaaaaagacgtgttttctctatctgcttgcatcagagtgtttctgatttaaatgtggatttaatataaagtctttatataaaagaactgaaaatagaacaaagggtatttacattaagttcaaaatgcacaagagattttggcaaaaaaataataacaagttttatagttaaaaagagtaagaataatatcaggttaatcaatttttaaaattggggtaaatttacataccataaaaagccgttttcaatgtttagttcagtgagttttgacaattttatacacacctgtaagtacaccccaaacaaaatataaaatattttttatcacccgaggacgttctttcctgtccctttctagtcaaagatcaccctttcaaaggaaatcactttttgagttttgtcgtcacagattagtttaacctgttcttgaatgtgacataactggaatcatacaatatatattttggtgtgtgcctagcttttttatctccatataatgttcctgagatgcacacaaatacaagtagtctgttattttttttttatcggtgagtagtattccacagtacaaatttaatgaaatttgtttacctgttcttttatggatggacatttgagcagcttttggttttatgtattacgagtaaaactattgaatgtttttgtataaatagttttgtaaatgtatgttttcaattctttttgataaacgtctagagaggagtcatatggttatatggctagtacatgcttaacttaatgtgaaatttcctgaatttctttaaagtggttgtatccttttacactttcactgagagttccagctacaccatatccttaaccatcacttagtgtcatgaatctctttcatgttagctcttctagtcagtgtgaaatgctatctcgctgtgatttcaaatggaatttttaaaaattaccaatgatgttaagcaactttgtcatgaatttactgaggatttgtatatcttctgttgtgtagtatctcttcaagttttcacctatttaaataactggatttgctcgtcttttttttttgtttttgatttgtagaagttcttttttattctgggtgttagtttatagattagatgccaggtatatgtattgtaatatttttcctagtctgtggcttgcataatcatttaaaaatgatgtccttatatgaaggcaactgtttaattttgatgaagcccaatttaattcgttttatggttggtgagttttgtgtcctatctaagaaatgtttgtctaatccaatgtttcaaatatatatatttttttctagaagcttcatatttttggattttatgtttaggtctgtgatcaatctcaaattaatttttatgtgtccagttagataaggattgaagttcattttcttccatatgaatatccggttccagtagtgttttgtaaaaaaaaaaaaactttctttttttcctactgaattgatcagatcccttggccaaaaattaatttactgtattttagtcagttcatttcttgactctttattctgtcccagtgataaaactttcttattaggtgcagacatattaaaatgtgttatgccttcttaatgattaaaatcctttaagccagtgtccttcctagcacacaaaatttttgaacaaagtcaggtttgttctactaagattttgatgtacagtcatgcatcacttaacaacagagatatgatgagacatgtgcccttgggtgattttgccattgtgtttacatcacagagtgcacttacacaaacctagatggtatagcctactacacacctgggctacaaacctttacagcatgttactgtactgaatattgtaggcaattgtaacacaatggtaaatatttgtgcatctaaacatatttaaatatagaaaaggtaaagtaaaagtttaatataaaaataaacatggtggacctatacagggcacttaccataaatagagcggcaggactggaacgcgctgtaggtgagtcagtgtgtgagtagtgagtgaatgtgaaagcctaggacattactagacactactgtagactttataaacacttactcttaggctacactaaatgtagaaaaatacatattctttaacatacatattctaaaaatacatatcctaaacatacatatcctaaaaatacatattctagggaaactaaattaactgtagcttactataacttttgtacttcataaacttttaatctttttaaacttttggactcttttaatcttttttaaacttagcttaaaacacaagcatattgtacagctatagaaaatattttctttatatccttattctaaaggcacttttttctatttttaaattttttatttttattttttagctttttaagctttcttgtcaaaaataaagaaacaaacacacgcattagcctaggcctacacagagtcaggatcatcaagatgttgctggatgataggaatttttcagctctattttaatcttatgggaccaccattgcatacgtggtctgccattgacccaaacattgttatacagtgcatgactatacttgtctaatactatcccatctcacaaagcaacctcagtgaattaaaactcatcagtacctcaagtttccaaggccatgtttagcccctgaggactcagttgctcacttttccttgtggcaatttaatgctgcagcagtgtaagaaagatcatcgtagctgcatttccaagcctcatcctccaataaagcttttgtcaataattttatttcttagtgaatgtcaagctcaagagtggaagaaaagagtattacttattggcctcttaaaacgtcactcacttgaagggctgctatgtggggttaaaatagatataatagtttggttttctattagacttttgacatgttaactgataagcattctggttggcttgacagttgtattttctttttgcaaattaataaatgactcttttggtccatgagaacagatagcaaaaatgtgcctaattataccatagaatcaatttgtaggtcaaatcaactttcaccagaatagtgtctccctgcaaatttgatacataaagcttattaattgtgagtctttcttctaatgacaacattataaataggctttatctaacatttttagaattctcaccagaatgggaacatttctacttaaatagaaaagctaaaagcaaagatattttgccagttagttattttagttactaagcacttctcaatagatatttatgattgctggactatggcatcaaattttgtctcactaataacttcttgagattacaaagtccaatagcaataatttattatattaattaagagacatcgtagtgatgtgtttaatagtaataggaattagacaatattattaaggatttggtgtatatataaaataatgctattcatgactaaaatttatcttgattcattttctaaaaataactcaatatatttcatgtctctagtacttttattacaattctctatgaatatcctttagcttaggtaggatatttcattaagcatacatcatgctaactcaaggcaggaaataataaaattatgtgaagtgttaacatatctgagagtaaatgataaaaattaatctaaccaagatgccagccataaaataaattacatgggctgaagaaaaatgtgaacatcaaataaaaaagaagaattgcattctaaatctaaggcaaggtagatgagtagagttgagttccttataaagaaatatttgaagtcataactataactagactttacttcaaatgaacaaatctcaattcagattctttcttgccctgagctgcagctaatatgtctccatttcacgacgaatactgtcaggaatgacaatgaccgataagtagaaccagtacaaagttcctcctagaatggaatgtcacccatgtgagggaaaagaagacaaattaagaccaaaattaaaatatatcaccagcagccccaaagcactgactcaaaatcaggtcagtttaaacgtttgttatatgttacttcaatttttaatatttcctggataagtaaccagtaagtgggggattttcccaacagaaaacaaatgtctctctaggaaaactaaggcagtgaattgtcaacaagaggaacagtcaatgaaggcaaaaaaaaaaaaaaccaaaaaaaaaaaaaaaacacaaaacactggttaattgctgtttcaaatttttccattcaatttgtaaaatttcgattttttttttttacaaaatttcctcttagttgacacatgcttattatagaaaaaatgttaaaataaaagaaacagaaagcagaaaagtaacctatgcaatgtttagcactcagagaaaagcaatttaaatgttgttccacaccctcctgaacttttattatttttttaacataattgtgttcatattgaatatacattttttgtattctgggtatttactcacttaatgtgacataggtgtgtttgcatattattacatactcttcataaagataattcttaacaacttcacaatattctgacaagtatatgtgttcccagaagtatgaatattttattaatttgacacacattaaattgatacatatagacaattacctttccaagaattgtactgatttacaccattatattatgataccattatattgtgtgagcatgcctatttcaccacattttcaatagcattaatctatttctggactgtttattccaagatttatcttttttcaccagttttgtaaaaactattacacactttccctcacattaacattgaaattgcttctaaatgcaattaataaaaataatattgagattttgattgtgtctctttccgtcaaacctttccatgacttcccttttgtctagttcagtggtgctcagccaggggcgattttatcccccaggagaaattggacaatatctgggggcattttggttgtcccaactggagggtgggactgggggaggcagggttagtggagagtcttgctactggcatctagtgtttaatggccagggatactgctaaacattcttcattgtgctgcataagacagacccccaacaacaaaggatttccccaagttttccaaaatgtcaatagtgtgggtgggggtcaaaaaactctcatctatgggatatattggaaacaactttgcttggcacaccagcctgtctttcatccaactcaatagtcttctaactgaggtacttaaaagccctggtggttggtttctagatcctcaaaatgatttgcaggataatatatccatgttcaaaataatactacaggagaaagaggagaggagggaggacgagaaagaggtatatctttcatctatttcaaatcatgctatgttgcaatgcctctagggtgaaaagaaaaagcaaactaggagcacgactttaaagattaatcaaggtaacgcataaatccatgtggcttcaaactctttataacaaaatgagatacagtgtgcatttaatatttggtaaggatagtcttatcttttcttgtttaaattttttctagatatttccacagacttacaatttccatttgaacctgaaaactggttcagtttaaaaaaattcccgtccaattttttacaatcaatgaacctacattgaaatatcattatatgtacatatacatataaattacatttctataaatttgtcctaaggaatgaagtagaattggatagaaagatatgcaaataacactaacatttacagcatgcttacaatgtgccagcattctaatacatcttaatgtctcagttaatcatcacaactacgctcaagttggtaacactgcgatcttcactttatgaagaaaactgaggctcagaacaggaagttgttccaagtcacagatctatgaagattatagatcaaaccacattctgtgtgatgccaagaccctatatccagctttttctaaatagcagtcttttgggtttcacttatgtgtgtgtgtgtctttgtgtctgtttcaaagtagttgaacaacaatatcagggaaatcatggttttaacgttttaggtatatttcttatatttcccaaaaaaccaatttgaaaatattctacctacgagcctctcagagaggctgtctcttttatatccaggaaccagcactttgcttcaaaggctaacacaacaatggcctgaaggcaggaccagtgttgtgttagtaaagttgtgtagagtaaaacatgtttcaggatctgtcagggacttcagatactttactgatggcattgaattcctgggcttgacctattactgcacctccagcatccaagagcactgtcttacaacttactccttatgactcacctataacaaacatcactgattacatcaaagaaaattattgttaatgccacttagactaattaacacaacctttggtgtagataccaataagaatagtttaagtaccaagtaatctactcttaaaatgttgattcttcttaggatatttcagtgctaattaattgtccagaggatgtggattagggataatgtgcattatgctatcaagggcaagctcacatgcgtgtaggcacacacacacacacacacacacacacatcaccccccaaaatgtttatattgaagcaatttaaagtaaattatcacacagactacagaatagtctcagcaaacagtaactaccagaattatctttccagtgttacttataataataacaaaatttattgaaatgtctaagacgactggcttgatttagaaaatatcttcatacattcttgagtttctcaacttcactatttttgatattttgggctggagaattctttgtcttgggagagattgtcctgtgcattgcaagaagtttagaacccttggtgtctcccaagtacatgccagtagtagctcccttttctcagtagtgccaatacaaaatgtctttagacatcgtcaaatgtcccctgggggcaaaattgcacctagttgagacctataaaatggactacaacccatgtagctattaagagtatgttaaaaaaatatttacttatctacgcaaatgttcatagtatatttaatggaagaatcaggacaaaacaacagataagttagaccttgatttataaaataaaaatggatacatgcattgaaatacaaagacagctagccttttttgtgtgcttactctgtactgcacactaacctttcacatgtgttatctgtttaatttccataataaccctcagaggttggtaattaaccccatttgataaataaggaaacagaatctcagacaggttaagcagctgaatgataattttataatattaaccgcagtcatgtctgggtagtgaaattgggtgtaattatttatctctgtattttccaagatttcaacaataagcatctattatttttaatcagaaaacttaacaaatgacattattgggccgggcacagtggctcacacctgtaatcccaacactttgggaggccgaggtgggaggatcacttgaggtcaggagttcaagaccagcctggccaacatgataaaaccccctctctactaaaaatacgaaaattagatgggagtggtggcaggcacctgtaatcctgcactccagcctgggtgacagagtgagactccatctcaaaaaagaaaaaaagacattattaaatcataaacctttcttttagagaataaaatgtatgtattgagtgcttgccttttgctttctttcagataacaaaatatagttaatgaatgctatctggttgttttaatgaaatacttatattcttagcctcttttcctatgccccaacttcttttttggtaacattttcttcccagttattcaattactgaaacctgtaatagagaatctttcccattattccagctcaggtgtatatttggtacttcaacttaaatcactgaactacaatcttgacaaactctttctagataaataaagcatttattgaaaatttgttcccttatttctctagaaagagtccaaatttcttgaaataattttttaaaattaacttagaactcactagaaaactctcaaaaatcctgctgaagatcattcgaaaatatatcagctaacgttcccctccttggtgaactatgttaacaggcatagcaagttaaaacagtgttcctattccttgaggctaaataaagcttcttggagattctggaggttcccttcactggtccgtgattaggacgtgatactgacattgaggaaagtaagccctttctcacaccgggaattatttttatgttgcttcttgcttgcttgaaggttattcaaaggggcaaactaaattggtttatgattcattagctaaggcattttctgtatactgcttatttaatacgtgattttcctggtgtggccagaaaaaggagtcctaataatcatggtcaacctctgcttactcttctggtcatgacttttctttcctttttttttttttttgagacagagtcttgctctgttgcccaggctggagtacagtggcgcaatcttggcttactgcaacctctgtctcccgggttcaagcgattctcctgcctcagcctccctagtagctgggattacagttgtccaccaccacgcccagctaatttttgtatttttttttttttttttgagatggagtctcactctgttgcccaggctggagtgcagtggcacgatctcggctcactgcaacatctgcctcccaggttcaagtgattcttctgcctcagcctcctgaatagctgggacaacaggcatgtgccaccattcccagccaatttttatatttttagtagagatggggtttcaccatgttggccagactggtcttgaactcctgacctcaagtgatccacccgccttggcctcccaaagtgctgggattatgggcatgagcaactgcacccggcctatttatttatttatttacttacttacttatttatttatttattttttgagacggagtcttactctgtctccgggctggagtgcagtggcatgatctcggctcaccgcaacctctgcctcccgggttcaagcgattttcctgcctcagcctcctgagtaactgagactacaggcacgcaccaccatgcccagctattttttgtatttttagtagagacggggtttcactgtgttggccaggatggtcgtgatctcttgacctcgtgatccacccacctcggcctcccaaagtgctgggattacaggcgtgagccaccgtgcccagcccaatttttgtatttttaatagagatggggtttcgccatgttggccaggctggtctcgaactcctgacctcaggtgatctgcccacctcggcctcccaaagtgctgtgattacaggcatgagccaccacgcccatcctggtcatgacttttcttggcaattcctctgagttcctgaccctcattcagtctgctttgttgccctttccccttgtatcttctgagagccccgcaagccacaaagagatttatcacagtgtcatttgtgaaaactcatcacactttgcaagctgcctctgtggggaagtagatggtgttttattgatgcttaggtattgttgcgggatcctgaggaccagagagagaccttggggtgtaaacaggaggatacatttattattgaatgcactcagacctagcagactcaatgtccaaagactgggcccagaacaaagacagcacttgacttttatacacacttcacaaaagaggtgggctagtttgaagcaggcttatggttacggtcacgtgaaagcaaggatacagaggcagaacaattaattaaattgtgacaggtttataactcaggattacacatgaccattgccaagcaacccagatgtccattatctaggttttgctctaaagagccttgcactggttcatctcataacgtttactatggtgcccaggcagcggtagttcaggcctgctcaggcttctgatgaccttcattgtacttcttagataaaacagaatacttgaagttactagttacagagaacaagaatctataaactcattccataaaacaaaggaaaatttgttttttcttctccctgtgttgagggagtgctgggagagtctccagagcgcattagataatattatcaggacttttcctgggtctgggctgtgcctgttgctatctctgggacaagtcagcctaatacaggaaagcttatttttctttctttttaattttatttttctttaatttcccacctcagtatcactactaaagtttacatcattttgtgtgttttttagataaattaattactatacggtatttgactctaggcttcaaagtcaggtttcgaattatgaaacattcagttctactttccagtcttcattcccacaacatacttgccaggaagatatttctcaaaataaacacctgtctagcacactgaggtttcacaagtatattgggtccttgcccaattctctctgtatttaatatctctttctttggagtaagtaagtctataagaaagcaaaagtcaggtatacaattttatccgagggctctttaaaatagataaccagaggctgggcgtggtggctcacagctgcaatcccagcacttcaggaggccgaggcaggcagatcatgaggtcaggagagcgagaccatcctggttaacacggtgaaaccccatctctactaaaaatacaaaaaattagccgggtgtggtggcgggcgcctgtagtcccagctgctcgggaggctgaggcaggagaatggcgtgaacccgggaggtggaggttgcagtgagccgagatcgtaccactgcactccggcctgggtgacagagcgagactctatctcaaaaaaaaaaaagaaaaaaaaaagtaaataaaataaaataaaaaaataaaaaataaataaaaaatagacagccagagtggaggaactagtcagtactagccatttcactatgtctgagcaaacttggagtcagtgaagttttctctggctgggttctgcctctgaaacaaacactttgcagccaggaaagttatgcaacgtctataatctaggaggctcagaccatctttgcccaccatgcgttacctttttttcttgcctaccccctacccttttctggccagatatgagaaatttcaagctattatgtatgtggtggggagggaagataatttggggagtgtggaaagagaattagctcagcatattcaagtatattggaatatatcttctatacaaataaaaataaaaatgttattcaaatgttataccattcatttgtttgaaattatctactttacatagtaaagtgcacaattgttcatctatattcaaccagcacacatttactgctgcattttgctggtaaaatactgcaataattaaaaaaatcagttattaacgtcatttgcatttgctcttacaaagtttatctaacagttattgtttatgcttatatcttaggcttcacaaaatagcgcattgctggtgcaagttaggtagtcaaaaattataggtattattattttgaggtttttgtggaagagagagttaagagtatggtactctgtaatttttaaaacctcacattcattatctgtacaatgactttggttcggggggaggctttcaaatatccagtatccaattaggctaggtgataagtgttattcaacattacaaaactgaaaagtaactctgtagggatttaaatctgcctgcttccaaaaccaactcttacctattatgccagtgctaagagagttagagtgaatgaagaataccagggctggagtggcgttgtcagtgtttgacaagggtagcagagcaggctgagtgagactcatggactcaccacaacataggggtgaaggagagatgagatcagacaatgctgttggcttgaaacatggccttagggttttaaaggtcaaagtctgcgagttcagaaagagtagggagctccaatattaggtacccagttaacaaaattaataaaaccttaatggtgaaatatcagattttagttgaatgagagaggcagaaggtgaggagtgtagctatgactctgattgtagttcaggtgtgatacaatgagaagctgaattgcagtaggagctggcctcgcaaggaggacatgggctgggcttgaaaaaacagtgtgtgggaaggaagcaagtggttaaggcttctgcagctgaattcttgattcaagtcccagctttggtccctgccatatatataacctcaggcaagttaattaaccatccgaaacctcagccgtcctctcactgaaatgagcagcatagcctgacttatagggctattgagagattaaatgatatgtaatgcatgtgaagagcttagctcagagcctggcacatagcccaagttcaagaaacaatagcaacactgctgaaaaaatgagtaggggcgggaagaatgggggtgggggtgttgatccagggtgatttggatcatggcggtaccattaagaaaagttaaaaacccagaaagaggacgtggttgattcagaaggaggatagtaagaacagctgatattgatgctctggtgtatgaaatggtaagttttaaagattgcatgttaagtgtccagcgctgccttattagcctggggagaggctgcagtgtcttttgtttttctggacagcagggggctcccaggtactggaaagcagcaagtgagggtctcctactgttttctgtactttgctcactaatgcttgcaaaagtgagctagcatcatctgatgctatggttaaaaagaagttgtgtattcctggacttataaatgcataattttctctatgaggtacttgaaatccattgaatcttatagagctggagtgtagcttaatatccagcaaaaatggaacagatcagaccaaaaaaagagaaggtgtgtgtgtcacaaactcacagattaaaaggaataatggggactagaatgtagcataaaaatcaggaactagagttgtggatgcagtggtaggaacacacaaaggagagagagtcttttcttgccttgggaatctggggaagactcattagaagagctgggtaaggcaggaagggcattccacgtgaaggaacagcacacgtgcaaagacacggagaagtgaaattgcctgagaaattttctgagcacagcaaatgtagtttgtagaaaagtaatgataaaccttagacaaattaaaattaatagagtttaattgagcaaagaataattcatgaatggggcagtccctgcccagaacaggttcagggaggctctggtgcagctacatggtcaaagaagatttctggacataaaaagaaaaatgatgtacagaaaacagaagtgaggtacagaaacaaccagattggttacagctgagcatttgccttatttgaacacggtttgaatagttggccgcctttgattagctgaaactcagtgattggcataagagtaggttactgtctgtttacacatccagttaaattacagttcactatgtacacagacacgcttaggccaaacttaaaatatgtaaggagacagctttaggctaaacttgatttaacagtaacaaatgagaaaaaagagaagcccggagagagagcgtttcgcacggagtcaaaatctgaataagtaaggagcccacatttgtagatttctagtacccttttccttgcactttgctggtctaattccttctacacagttaagagctctgagtaactgagttactgagtttgcaatttccagacataatgtttctaccagtatattaattattctcttcccctttcaaagaatcacttctcaggagtcacttttctctttctaattttgattttgttgaggctcagaaagcaatactccaaagacttgtgctttgacatgctgagaggccttagatgctgcttcagaggcaagagtttctaaccttgtctcgttccccactccaacttgtcttgttcctttaagtgcaggaagggactctggaatttctttaattgaccaagaaagtttctttccaaaataaatgcaattgtccttttttgttgttgttagacagggtctcaccctgtcactctgtcacatagaattgagtgcggtggtgcagctgtggctcactgcagcctggacctcctgggctcaagcaattctcccacctcagcctcccaagtagctggtaccataggtgtgcaccagcatacctggctaattttttaaaaagaattttttgtacagatagggtcttgctatgttgcccaggttggtcttgaacttctgggctcaagcaatcctcctgcctcagcctcccaaagtgctgggattacaggcgtgagctactgcaccctccctcaattgtcttaaaccccctctgtagggatctcattagataactaggaaagatcaaccatcagagaagagaagagactgggagtcagcaccacgttgagagagacttttcatctgttcttctgaggacagccctaagaaattacttggggtactttatttgcctaataagacaaactttgtgcccatacagcaccacgtctcaccttcccttaatgtctctgccttccacttttggagtccattcattcctaatgacttaccatccctcaaaacaatggtctatattccccatctttctcttgacctatgaaaaagtgtatataagcttctgtactgcattgggttacttgataatcactctgtgatttttttccccctgtacattaataaatttgtatgcttttctcctattaatcggtcttttgtcactttattttcagggaaccttcagaaggtgaacgggatccctgtgcccctacaatttgttattttcatctaggatttttctgtaattaaaaaaagttttttgaaaaacaggtgtctatattgttttacactaaactaaaactgaagtaactaacaagtacaattcactgcaggtactctcttcatcttgtagttcacgcttaagcactgaacctgtgctaagaaatgtgagtattcctgtagtcaaagagagtcatcactcaaccaacaagctacgtccctgtgaaaattttagcatctaatcattaaattgatttaaagcaagagagatagtattgctattgtcttattaatggaatggtttcagtcatgtatgctaattttcaatattagtacttttcaagactgggaaactcatttgtttttcactgaatgtgaatttgaaagggtgaaatgaaataaactaagaaaggacaatcaaattaatgtaaaaaaggcaacagtaataaaaacagtgttcataccagtatttagcatagtgcctggcagatgataggtactccaaaatacttttttttttaaaaagatggggtcttactaggttgtccaggttggaatgcagtggctattcacaggtgtgatcattgtgcactactgcctcaaactcctgagctcaagcaattctcctgtctcagcctcctgagtagctgggactacaggtgcagccactgcacctggcttcccaaaattcttcttgaatgaatgaatattgaatgaatgaatgttccttaattctaggtacatcaaaagcagtgtgaattggtgcacatgattttagatgttaggctgtttcaatattacacagaaactaagtctccacatgataaccctagtgttttccctaaaacaacaaaccattaagttgaagtaccaactgtttcttctcatcttcatgatcatttaaaatatctggctcttttcctctcttttatgcatcataatttttcaaatgtttttctattctgtgtctactggaggttgttaatgttgttatgactgttaattcttctttatagagttatagaaggatctcataaaaagtaatattggtgtgtaaataagatgcaagaagcaatgaccttcatttttctattcaatagaaaggagataaaataatgagtaataaaatccttctagaaattctgattcttttttgatcaacttgatacaggtcaggtagaagtggtctcctgacagaagtaatagtctttttcaatccagtggagaaagcctatgtgctcccaataaccccacttagttttgttgatatttgagcattagtgggtaagttgtggttaaatatcaccttgttttttcttactagaaacttaatgttacatttttaacatttaatgttaattttatttaatttcaatttaattttaatgttatgttgatagaagagataacactttatggttaaaatcttgtttaggatctgtataatttgatttcacttctcaatcagatggattctatgaagagttcaatcaaaaagataggaggtatgtttccatttctattcagagttttaaggagagaatcttatcttttggggttcctcaaccctttttgataaatggtaaaggaacattttgaaaatgttgttgtacagatatatttgcagatatatggtgcagatatagttggtatttcctaaaaaatcaactcatataaatatttgagagtctgttgttttggtgaaacaatggaaccattatgtgattggtattatgtaactgaaggtttcaaatggcttcctgcatttaccaataattcacaagggatgcatttaggtatattttctaccaagcccacagcattttggctgagatttccaagtcaggtgaatctcttctattgttcacattggtgtctatgccaaagaggagtgattcaacagaaaggcagtcttgcagcacatagctgccaggtttctggatcatacctatttaaaagatgtaaatttgggacccagtcaagacacaagaaaaaaaatgcaggttaatgaatggcataaatatttatattttacctatgtatgtaatacctaaaactaaagcccaaagagaaatgaaaatcaatagaaagtgaaaacaaatgaatctgaactttcagattgtattttaattcactgcctgatatgtttagacgactgcatagcattccctctttttttttgatggagtttcactcttgttgcctgagttgaagtgcaatgccatgatctcagctcactgcaacctccacgtgccaggttcaagcgattctccgtcctcagcctcccaagtagctgggattacagacatgcaccaccacacctggctaattttgtatttttagtagaggcggggtttcaccatgttggtcaggcaggtctggaactcctgacctcaggtgatccacctgccttggtcccccaaagtgctgggattacaggcatgagccaccacgcccggcctgcatagcattttttttttttttttttttttttgagacggagtctggttctgtcgcccaggctggactgcagtggcgtgatctcggctcactgcaggctctgcctaccagctttacgccattctcctgcctcagcctcccgagtagctgggactacaggcgcccaccaccatgcctggctaatttttttgtatttttagtagagatggggtttcaccgtgctagccaggatggtctcaatctcctgaccttgtgatccacccgcctcagcctcccaactgcatagcattctttacaagttgccccatgtgccaatgaagcagaaccctgtccaaagaaatcccaagtagttagggtagaatgggttctaccgacttctctttttcttcacacccattatttttataacgcaagtaatgcagcatgtatttgttgttaaacattgaaataataaagagatacacatattaaagaataaaagactcctacattcattgctgcccagctcccaaagataaccactgctaacaagtttgcactcatttttctaaacccttttaaatacacatgcaaacacatttatctatagtgtgtaaaaaattctaccatatgttacatattatttcacagtttactgttctctcttatttttttaaagagatgggggtctcactatgttgcccaggttggagtgcagggggctagtcacaagcatgatcatagtatactacagcctcaaatttcgaggctcaagtgatcctccagcctcagcctccctagtagctggggctacaggcatgtgcaaccatgcctggttacttttttctcttgacggtatgttatggacattttcccatgctagtacatggatccacctttttaaagattgagcctatggaattctaaattatgggtataccataatttattaaatatttcttctcattgtgttaggaattagttttggcactagtaacagagactaaaaaatttggcaaaaaattaaaagttttatctttctcatgtaacaaaagttgtatagtcctgggcatatgtgataattctgtggcgttttcagagatagactgattttggtgttctaatactgagtgtagctcccatcctcaaggtaatattatggtcccaaagtgactgttggagctctagcaatcaaatcttcattccagtcaggaagaagtgaaaggtaaggaacacactggtgttccagtaaagtcagtccacctttaaaacacttttgtacaagtcctacctaacaattcctgcttatatctcattggtcatatcttaacacatagccatccctttctgtcaggaattaagggaaatttaatactttagtcagatatattgataccaccaacaatcaggttcttttagtaaggaggaaggggagaatggagattgactgggtatcaagcaatcttaccacatgtattggtatatattttggttgtttacagttttcactataacaaatagtgctgcaatgaatatacacgaatgagtttcttttcattatatttgtttcatatttttctgtagcccgttttttactttggttgatttattaattatcttctatatgttacgccttttcattatttataacttcacccatttttcatctgttcttggctcaaaggaggaagcatcctgctctcttctaagtgttctctcttgttccccctttgatcttggtggtgaaaacagaataataggttaagatgttgatgtttggaggtaaaagaaatataaactgagggtgtctccacctgatcatctttatgaaaaggcaaggtaccaggagcagacagcacagaatggggctaacttctcactccatgactttctaagggttgcgaccttcaaggaattacttaatgtctttgtgccttagtttttccatctgtaaaatgttgttagttttggcatttacctcatagggttggtgtgagaagggaatgtaaagcaaatggaaatagtagctggcatatactaagtgctatgtgagttaacagttgtcaattctcacctcagtgaagtaaaaaatggtttctgtgcagtataatgggaatggagacacaatgagagggtaggtggtggtcagagtccacatggtctttgtgagagatttgaggtggtcagggaggtatgaatcaagggatggttgtgtaatgttgagaggacatctgaagtcgggcatcacattgactgcttaaaaacaggagtaaagacattgaataaataggattgaaattaactgggtagggttggcagaaggccaagtggatagagcactagaaggtgctgatatgagttagctgaaataatttaccacaagattctgggtgggaaaagagaaacagaagagtacttcagaaagtcatttctcttgaattgaggggtcagagtgaattgtggatagaaaaaaggatgtggactgagaatagattttcagaattcaggcttttaaagatatcattctgggtgatagcatactttcaggtgtggctcatgtgactggattactgcagtgaaacaaatgccagagatgaagatcagggaaatagagggaatcaaatattttgttcagtttaattaactaggcaattgatcacctagtatgtgctaaatgggttttgtgttgttgtgaacaagatataggtatttcctaaccattaagttaaaaaatgtatataacaatatatatatttgttttttaaaaacatatatataaaaccatatgtttattaattaagaggaatcaaagtcacttacgtatacctagatacttaccatttcttatgttactcatttcttcctgaagatctgtgtttccctgtactattattttacttcagctgaggaatttcctttagtacttcttatagtgtaagcctgcttgtgacaaattttcctaattttccttttttaaaaacatgctttttgagattggtttttgggaggatatttttgctgaacttagaattctgtgttaatttagttctctctgcgtttaaaaatatctcaatgttttctggactcctttttttttctgcaggaagtcagaagtcatttgtatcattgtttacttacgtgtaatgtacatatgtttctcccatggtagtttaaaaatatatttggaaatttttgatactccctacttcaaaaggtggagctgaggttcctccccttgaatatagctccaacttagagacttgatactgatcagcagaatggtaataactgacttccaaagccaggtcataaaaatgtagttcagagcacatgtaaagagcttctctctggctctctgtatttctctcttcttgttttgagggaagtctacccactatatcatgaagacgcttacacaatagtaggaaagagtccacatggagaggaactgaggcctcccaccaagtgctggctccaattgcctggcatttgagtgattcatctaagtgattcaccttgccagcagatcctccagcgccaatcacatccagcttcagaggatggagaccttgcctgacatttggttacaacagcataaaagctaaggaccataacctaagctgttcccaaattctttcccacagaagctgtcagagaaaataaatgtttatttttttaaaccattgaattttggagtaatttgttatgcagcaataaataattaatacattttctaattcaaatgtctgtggatgttatattcagtgctccaattcttcaatttgctttgcctgtgtaagagaaagaaaaaaaattgtaaaattcaaggtgtaccacaactgaaaaattaacctatagaggaaaattattaatttgtggtaaaccagtttattttaaaaaaacattttgtctccttggtttgccattgtagcttgagcaccttgtgtaatgcttggtacataataagacattaaataaatattgttaaatgaatgaatcaataaatttgcttcctcaggttttaagcttctgggggacaaaaactatgccttattcatctttgtatctccctcatatggcacaattcttaacactgaacatgcgccattcactgttgagttaaattgaacttaactgaaattcttgttgaagtaaatgatctggaaatggaagtgaaaaatcatagcaaaaaattcattttaaacgtttatattgtacattgactagtggtggttttcaagccccatcaacctatcaccaaccaacaaacaaaaaaccctaaattcacactccattgctgcatggcagaccacatggatttttataatttctaccaagacaacacatcttcagatgtttctagggaatctttatgaagcaatatacaatggtaggaattttactgtgcttgggttgtaaactattgcaagctgttcaatttagtagattatctgcacaggctgagtaacctgtattgttccttatccagttgagccttaagccatttcaatagagccgaattttatgaacatagtgaatttaaacacttattcactcttactcactcactcatgcaacatataaactgagcaactctcttcctctttgggagataaagcgtatccagggtgtatcccagtggtttggagcacaagccagacttcctaggtgcaaatttccagtggatcccttaccagctttgagatctttggtgtacgtcttaatctcttgccttagtttcctcaattgtaaaatgcagaaactaatagtacttacctcacaaggttgctgtgaagattaatacataaaaattgcctggcacatactaagcatgaataaaaatcagttgttattgccttcaatgcctaccatggaccctggaacattgcaagtgacttgtaacttttgaatgaatgaatgaatgaatgatgaataagatgagagttgtgtctaaactatgttttgtttttttttgtaattgcattctttgatcatacaaaagttttgattgttcactcctttttagaaattccctattagatcaaaaagaggcagaatatgttctttgataaaggatatacaggtaatattggcacatgattacctggagttggtgtattagtctgtcctctcactgctataaagaaataccggagactgggtaatttggaaagaaaagaggtttaattggctcatggttctgtatgctatacagaaagcatggcagcatctgcttctggggaggcctcagggagcttttactcatagtggaaggcaaagcgagagcaagtgtcttacatggcagagcaggagtgagagagagagaggaggtgccatacactttaaacaaccagatctggtaagaactcattcactataaagtaccaggcgggaatggggctaaacccattcatgagaactctacctccatgatccaatcacctcccaccaggcttcatctccaacactggggattacaattccactggaatttggtgatgacacagagccaaaccttattagttgggaattaaacacacacactttgggctaaggggaattttgatttttcattttaaccccttcataaacgtggacatggcagacaggagtcaaaatagaaaggagcatggagactcagacttccaggtatgccttactgaacctgtagaaggtacattctaactagcaagcagggccaaggctctcccccttgactgcgggcaatacctggggaaaggtgaggggtctaattaagcctttgcattccccaaacttggcaaagtgcctggcagagtaggaagaaaaaaaattgtttttaaggaatgacgtattagacgatcaaggcaaccaggaaggctttgggttgaaatattctaacctttggtcataaaccttccacctgtacctcaacttccacttacataggctgactgctcagttaccaagccttctccttagaaagacttcctttcaatgcaagcagcagaaaaaagcgactcagcttaaacttctcctggagttatgggaaccgcctccttcctctgtcgctaatggaggactaagatgggactgggagcaaaggagcgtctctgaatggcggggcagttgcagcatcccacttggcaagggtccttgaattacctccgcccccgccctgaccccgccctaaacatcaaacttagaaactcatctttcagcagcagcggtagagcagtgaccaggcgtctccgcgatgggccccggggacttccgccgctgcagagagagaatttcccaggggctccagggactcccaggtagagcggagctttggttcccacctcgtcccgcgtgcgacttcttcggggacggcaggagcacggacatccaggaggaggccctcgccgccagcccgctgctggaggacctcagacgacggctgacgcgcgccttccagtgggcggtgcagcgcgcgatctcgaggcgcgtgcaggaggcggcggcggcggcggcggcgcgggaggagcagagctggacgggcgttgaggccaccctggccaggctgcgggcggagctggtgagagagcgggctaggcggacggctcccagggctccctctcccgggtcctctcctccagctgcagagccgctggccgcgtagcccacccgacgccttggggggcccctcaggtctggacacggcgttgacgcccccgcctccccagcatcgttgggaaggaaaagggccctgcaggacccatggtggggggtgggggcgggggtgcctggtctaccagtgacatacccaagatgtctcctccccaacccgtttctatagttttctgccctgtagggaactgtgactatgtgtatgtatggctcgcggaggaggaaatttccatgaaataaactctctcttgcgattgatggagtgtgtccatcagtaactctttctttatgccccgcaagttttattcttatctttcccgtgggtaataatttagaaaactggaagtgataaggtattttgtaaaattgcaccatttcgaacattacacaggttacatccgaatattaaacaggagggtgtataggtaaatattttagctgactgattttttttaattcaaaaaactggaaattagtcacaacttgaaaaggacacaatgaataggagcaatcagactttaaaatggtgctgcctaggaaagtgtgcagtggagacttgacttggaaaattcttctcttttgcactgattactaatacaattaaccactactttagaactgagccaaccattagtaaattgtcttatttaagaatgttatcgcatttctaagtttaagaagaacagtattaggccggagctgtggctcatgcctgtaatcctagctctttgggaggccgaggcaagtggatcacctgaggccaggagttcgagaccagcctggccaaaatggtgaagtcctgtctctactaaaaatacaaaaattagccaggtatggtggctggcacctgtaatcccaactactccagaggctgatgcaggagaatcgcttgaacctgggaggcagaggctgcagtgggctgagattgcgccattgcactccagcctgggagacatgagtgaaacaacgtctcaaaaacaaaaaaaggacaatatcctaaattccgtgtcagattcagattgttaacatgggttacattagatttactaccagatttactatcttatccaacaatgtcaaagaaacacctggttttcaccctgagtctaagcagtgagtctgagctgcagggtagccggagccacctcattcggccactggaggcctgtgctatgggccaggatgctaaactggaaggctgaaacctggcgcagccatctctgcattgtagtcttgggatctgccggtactccttcctgagcctcaggggactcatatttaaatcagatgaggagattacactgaataagctcagagacagctttcaatcataacattttaataagttgcttgttaggagctttagacaagcaatatgttgggggtggcaataaaatctcacgagatcgggtgcgttcagggtggtatggctgtagaccgctggtggcaataaaatctaaacagatgagggctcaaataccaacattaccatttacaggttctgctaacacttgttggccttacaactttgggatcgttacttagccagtttgagtttgtttacccatctgtaaaatggaatttataatctcataggattccagagcttatgtgagataatattccatgaaatgcttagaccatgggtattgtttagtggctcttattattataatgattactatagaccttggactctgactgtaccaaaaaagaactgatacattcctataaaaaaatcaggagtttttctggaaaggaaccagagaagtttacacatacacaaataatgtgtccttgggttacagacgatggtcaacatcttggtcaatcattttatcctggtcataaagaagaggcaaaggagtgtggatactgtaccttaatatcattaccactagaagacttagttttcaattttcggctattaactggatttttacaggaactgacatatattcctatacaagtgtacatgtatcatatattaggatgatattcgtaaggaacgatgaacaaatttaattaatttagagttgtgttgcaatttatactattttctattgtttgactgggttttcttagtaagaatcattcacttctagggtctgtgagtgcatctcaggggttctatatacctaaaattgtatgcagaatttttgatgtgcatatagtttttcctcagagagggttcataactttcatcagattctcagagggatccttgatgaaagaaaagttaaagaaccattgatgtttgaatttcctaagtaagtgtgaattatacatacttattttacttagatggtaaatcattaccaataatttttctccttgattcttgcatgaaagtacaggacggatattcatcagttaattaattaattaattaattcactcactcttataacaaacacacagagaacctactaggttgtgtgcccaggcagtgcactcttagttggggatacaattatgaataatatacagcctctaccctcaaaatcatcagtctcgtctggtcagcgtgttatgaggcacttgtacagagtgctgtggatgcacagatgagaggcaattatgtctgcccatgcaatcagggagggcttctcagaagagctggcatttgactgggttcagcagagagaggtggcaaagggcatcttaaacagaaatggggacagaaagaggtgagcttcagctcagcatttatttagggactggcaaggtttctgaccagctgcaatgggagctggcatgggaaagagggccaggaaaggaagctcaaagtagggcaggattatagagcatctgggccaccctagagagctgaagcttcctgcaggcaaggtgcaagggttttttgttgtggtggttgtgtggttactgttagtgcttgtttgctggatattcatttactttattctttgctaattcttgctgtcagaaaaatgattctaggtgcttcagaatggagaggaatgtctcagagaaaaactgaaagataattttatccagtagctttattttgcaaatcagatgaccatgaatatttgctttttaccaacacactgtcctggttcatcctggggtggtttctattgacaagctgatgaagcttttttagcagagagaacaaattcctcgtgaactgcattaaacaagccctagctgaagaaatttgcaagtagttgatcattagttttcagttataatacaaagattatgttggactaagctttcttggactgcccccgggtaacatgccctagagatctttttttaaacgcacgaggaccttcataaactcccattgaaggatggtataaatcagccttgatatgaaacagatttcactccagagtgaaaaatgttagattatataagtacacataactatacatgtgtctctaaggtgtcattaaatgtttttgctcagcaggtagaccatttaaaatcctgaaaacttgaaatgataagtaatcaagtaaatagcacagattctgaatactcaggtggctgtaggcagttatcctgtggctcagaaggcgcataaagataaatgatttcattgtggatcacatgctattccttgaaaacagccttcggtgcataggtatttttcatatggacagctttgtgcatcagctacttttgttttcatttcaagccatttcaaaaactatttatatatctggattttaccttgtcatatagaaagtcagttttatagccagaccaaacagttaaaactggagaataagatgagaaatacatcttccttgatatcttattttcttttcctacaaacttcttatttcttctgtgtagtcagagagtggtttcatttgatctgcatctcaggctaataaaatttttatttttttctaacttttaggtggaaatgcatttccaaaaccaccagctggctagaactttactggacctaaacatgaaagtgcagcaattgaaaaaggagtatgaactggaaattacatcagactcccaaagcccaaaagatgatgctgcgaatccggaataaagaaatgcacacgcaagggctgggcgcggtggctcacgcctgtaatcccagcactttgggaggccgaggcgggcggatcaagacgtcaggagattgagaccatcctggctaacactgtgaaaccctgcctctactaaaaatacaaaaaattagccagacgtggtggcaggcacctgtagtccctgctactcaggagtctgaggcaggagaatggcgtgaacccaggagacagagcttgcagtgagccgaaatcctgccactgcactccagcctgggtgacagagcaagactccatctcaaaaaaaaaaaaaaaaaaaaaagcacacgcgaagctctggatcctaaaactaacgcatacaaccctgaaacaattctgatgaacacattatgctttgcataagttttgaggggcaatttatagacccaaaacaaatgacaggggaaggtgacagaaaaacatctaagagaggggagagaaaaatgatgtattaccaagttttaaagttatttatttgttatttttactgggacatagaagtaaaatataactatagataaatctctctctgtctctctcactcaaagaatgctttaatgccaactttcggtattcaaccttgtgtcacctgacctttctggcattgcctgagctttcagagtttgtgcttgttttgttttacttgattattctcagtttgtctgtccagcagcctgccctgcttcttgtggagaattgtttctacttggattctaaccatgccctttaggtggtctgtgactaagggtattccatcttcctggatatagtcatgcagctcaaggcaggcagatgggtttgtccttaggatttttgaatgggcactaaaagagtagatgactatttctgccagtagaagctgtggatcaggggcttggaagctgctggtggtcaccatgtgagaaagcccacaccctaatggaggtgactgaaacggaaccactaaaagcacaaaaggggagggagggagggagggtgcttcgcttccttgttcctggggtcaagctgtataagactccaggccttgctcttgtttatgtacatgaaatattctgatatccttctcataaaatctctttttgcctaagtaaattcaagctggagtttcatgacttgtatctagtgttcataactaatacagttgttcagttttaggagttaaaatggttcttactgttgaattggactatctaactgtacccgaaaagtgctgtctttttaatgcaaacagtaaagttaataaaaaatagttgcagatctaagtgatatttataatggttattgtctgcaaaatacaaattaatttataacaagctatgtaattttaatatttaataaactataaaaatcagttcttgaagacaaaggagaacagaagagacacagtctttctcttgttaaaagaaatacaaggacaagcatggtggatcacgcttgtaattccagcactttgggaggctgaggtgggcagattgtttgagctcaggagtttgagaccagcctggtcaacatggcaaaaccccatctctactaaaaatacaaaaattagccaggcgtggtggtgctcgcctatagtaccagctactcaggaggctgaggcataagaatcacttgaacctgggagatggaggttgcagtgagccgagatcatgcccctgcactccagcctgggtgacagagggggacttggcctcgaaaaaataaataaataataaaaataaaataaatgcaagttgttttatgtgtgtgaggatctgagaattatctggactaagtttagtttgtccttaacttttttgtccacaataagtaaattattctagccctttggtacttaatttccctctgtataaatgaggaattaccaaattcagcattggcagatgagcagttgccagcatctcaatatctgaccattgtgttccttcacacattttacgtatgagctcttggcctataaatatacgactactatattaaatttcatttgtaaactagatttcctgtttatttcttcctttgaattttatagaaatttttaggaaagggttggcatagttccttgtgatctgttttttgaaaaagcttccacttaacctttgggacaatcattctcaagtgcattttaaagattaacatttataaattgttgtaattttgtgtttaaaaaatactcgaggtgattcattgtatgagctcaattccttacagaatacagactgctgatgttggttaatactaatgtcatttgattatactgataatatattggggatcaaaagaaagaaaatttaaaagagaaagtatgaaaattgatgcattgattttcacatttttagatttaaaaaggtccattattgtattgcaaagttttgatcaccactttttccccacatcttttagtgatgaactttggatcactgtattttttagaggcgacagatacagaaacagaacgagaaactcctttgtgtccaaagtgtcttgtttatggaagtctgagtcagtggaggtggcctctgatattaactgtgcaatgtggaaatacaatgggagattgatacatgggacactatcattattaaaagtttttattttgttttctctccagtatgctatctcttgccttttgtttgtaaagtagcagaagccagatgattgtctttatatcgttctttgccatggcgctcagctgttggtcattagcttgctggcctggcatcctgtcagctgggacacatgagaaagcagagaaacttttctgagggctgaggctgccctgcaatctccacttcccctctttccaggatttctaaataagctggagcaacagtgtgacattgtaaagatctatgaaatgggagcgatcaaactggtgccagctggaggggaaaatgagaaaataattataacctaaattatgcatcggggaagcagtagctggataaaatgaagaaagtaagatgttcataacaatagtgggagagagagggccaaaagaagagacactaaaaacagttttgtgaggaaaatattgtgcttgggtttttcaaatgacacaatttctcacagctttaattatgtgggggattaaaccacgttagcaggaaatgggctttcaccatatggtacttgtttagcacctaccagtgaatagatgccaaattaattatgacaattagaagctttgcataggttgttaggcattaaattcctttacaggtggcctggatgaatccgcattttgtttggcttgccaaatgacttctgctgtaacaggtgcttctgcaactcccagcctggggacagatcagagtcctctgtgggtaaccccatgatggctgagtctaaacgagtgtaattataagaatctcatctcccctgctcccttcctggcagggcctagggtcccggcacaaccatcagctctatttaccgctgtaatcactgccagaatccctctgtgcctggaacctggcacgatgccctccagtgccagctgccttctctcttggttgctttcactgttgctgctgctgccattgccgcagcctctgtttcctttttgaccatgtcagtaacgaaggttatggtagggtgagaaatacagttagggtgacagttgagtctgtgccaccttgcctacctctcgtctggcagcctcttgttccatctgagctgagtgctgggcagtaggattcagatgggtggacacctattacagtagcctgtgtcaagcactgcttctcagggggctgtgtacctctcatctgcttcctgattctgacattgatgcatattgggggtgagagggcttcacctcttcctgaggagcaataatgtcatagtctttctcttctgggaccagtacaagagggatctgttgaaaagtaataatgatgaaactaacaaaggaatcagccaccactcccgtaccagccattgtgccaagaactgtgcatgtatcagcttatttaatcctcacagtgacttgtaggtgtataggacctgtttttggagctatttgaacttggtgtttagtcctggctctgccacttaccaactatatgacctaaagcaaattgctttaaattctttaggtctctctaaggaagccagtgaaaatgggacctgtcttatttaaatcttaagtaactcaaatcaggtttgggagaatgagttaatggcgaatgaacttctacgtcatgtgtttattccatatctttagtttcatatgatcttactacctttttggactgatactttccctgcgcccttctcttcctcacatctttatgtcttggtgaccctctgccacctgctcgctgttaggatgttgtctcagagttccctctgttgattcaaaaattgacttagcaaacatgggaataggcagcaggaagataaaaagtgaatagtcgctgctacttgccaacccctgaatctgcctggcatgcagcgctatgtatgtttacaacgtaattgtcccaacaaaactgtgaggttggaactatcgcacttcccattttacagaagaagagagtgagtactggagagatgatgtaatttatgacgatccactcagctagcacgtagagatgtcaagattcacatctgatgtttggagtggtctggctattgggcccctcccaaactaatgagagagacctggaactagtgagtaaattcaatattataatagaagaatgtatgaattgctaggagggatgctttttgcaggagtcagacaatgaaggtctcattgaagacatgcctccaagttattacttggtgtccacctgaaaaaaagccctcacatcctgtctaaactagttgagtgatcttggataaattactccaccctatttagcctcatttttttttcatttgaaaatgagagagatagtggaaatgccccctaaaacattcctctaacttagagcctctattttattctaatcctgccggcttgtaactggacccttcaatcacttgctcctgacttgccaagactttctgattcccgttacagcatgatggacagctgaccatttgtccctggcccctggcaatgaagtagactctcctggtctcaaaccttacctgaccacagcgtgagctgacgcagccttgatgatgacagaaagcaattcttgtcactcttggatgcccctctgctcttttcacccacaccatgactgcagccaggggcaaatgtcacatttgcacttctgagacagacaaacatcacttagaacttttacgtgttatgattttagaggcagcctgctgtggcagacgctgctggctgagaaccgcgccttgtgcagcctctgcggccggatggtggagttggaatcttggctccttcacttcctcactatgttaacacttctgcagttcagtttgcttatctgtaaatgattatgaatcatacttaccccaagagtttgttatgaggatctagtggactaatacacataaagtgtttagaagcatgaaaatagtggcttatttttacaacagccaacccaacaagtgttttgctcatccttcttgcctgttggaagtgcccaattccaagatagggacagagatgatagcttcacttttcccagtccctcttgcagttcaagatggcttttgaatccagttgtgtctgataaaacataaagggaagtttactggggggtttctgagaaacaattttttccccttacatgaagagagaaaataaggtgtcttcctccctatctctttttttctttcttccaggtattttcacatgcaattgtaaagcttgcctatgctgcagccaccctgtgacctaggtgggaaatatagcggcactttgaagatgacaggacagaaagatgaaaagcagtgtcttcaatgacatcaatgagcttctgaccccaccctgcaactgcctacctatggctagtcttgttctgtgagacaataacaataataaaatccaattgtttgaggcacttttattggggtattcagtttcttgcacctgaaagcaccctaactgataacttaatcccccaaaacctcctgccacaaaggtttgtgatagtgcatctctgatggcaactgtacatatcattggaaactatcggcacaggacttcagagacatcattacgttgcttaaatgtttcacatatgcctttggcgaggatgaattctatgcaatagtgtgtccagaatttggtgggttcttggtctcactgactaagaatgaagccacggaccctcacagtgagtgttacatttcttgaagacggtgcgtccagagtttgttccttctgatgttcggacacgttcagagtttcttccttctgatgggttcgtagtcttgctggcctcaggagtgaagctgcagacctttgcagtgagtgttacagctcataaaggcaatgcaaacccaaagagtgagcagcagcaagatttattgtaaaggacaaaagaacaaaacttccacacaattgaaagagagcagagccggtagccactgctggctctggcagcctgcttttattcccttatctggccccaccctcatcctgctgattggtccattttgcagagagctgattggtccgttttgacagggtgctgattggtgcgtttacaatccctgggctacacacaaaagttctctaagtccctactagattagctagacacagagcactgattggtgcgtttacaaaccttgatctagactcacggtgctgattggtgtgtttacaatcctttagctagacataaaggttctccaagtccccaccagattaccaagatacagagtgctgactggtgtgttttacaaaccttgagttagacacaaagtgctgattggtgtatttacaatcccttagctagacataaaggttcgccaagtccccactagactaaggagcccagctggcttcacctagtggatcctgcactggcagcaggcggagctgcccgccagtctcgcgcgccctgcgccggcaatcctcagcccttgggcggtggacggaaccgggcgccgcggagcagggggcggcgctcgtcggggaggctctggcgtcgcaggagcccaccgcgggggttgggaggaggctcgggcatggcgggctgcagttccccagccctgcgccgcggggaggcagctgaggcctggcgagaattcgagcgcagtgccggcactgctggggaacccggcgcaccctccgcagctgctagcccgggtgctaagcccctcactgcccgggccggccggcggctccgagtgcggggcccgcggggcccacgcccacccggaactcgcgctggcccgcgagcgccgcgcgcagcccaggttcccgcccgcgccactccctccacacctccccacaagcagagggagctggctcccgcattggccagcccagagaggggcccccagagcgcagtgtcgggctgaagggcttctcgagcatgcccagagcggacgccgaggccgaggaggcgctgagagcgagcaagggctgcgagggctgccagcatgctgtcacctctcaataggagatcagttaatgcatactgaaggaaggcttgttggagaagaatcctctcctgaaccctgtggagactctagaatcctgcggtaaatgttctaattattgaaaacatttcccaatgctcaccctcattaaggatgttctaatgcctaggagacctactacctatctgattctgtcagagaagccattttgttttttggcaactggaagcagtggggatgaaatattttcctaaggcgtctcaggactgaactggcagcaaaatagtaaactgtttatcagctcttaaatttttataccagggaggtttagcaaactgtcagaaaacagcctgaattgaatttctataattactgcttccaaattggtactgagggtactagttgctctaaacttctgcaggattcagtctgggacttttcatgctaagaaatatctcaagattttaaggtgggattgtcagggtcagaggacaatgtcctctgaaatccaccagtattttactggactttacggtttacagtttaccaggtaccttacagtttaccaactgctttccagtttataatttaccaggtgctgccatagctgatagctcgttaatcttacagtaaccagctgaagtaggtgtgccgtgaggctattgaattttaagaagcatcaagaaagcctgcctgtctaactttggaaatatcaccctcatgctgtcttcccaggatgtctctctccctaagtaagagatgttacttcctggagggaatgcagtgttgggaatctgaagacccagctttgagctgaatttgctttgtgatacctggtgagtcattgatgtctctgggcttcaattttctcatttgtagaaacttgtagagtaaggcatcgaactcataatcatctttaagattctttgggttaagcatgggcatctcctgctaatggttttaatttgaaacaatgttgttaccaactcattagtgtgaattaacctaggtggtgataccaaaaggttgagctttatttaaagtgtgcttagtgagcaattaaacaagggaagcttgtttaaaaagaagagtagaaaaatactgaaattaacaccatttgtccctggcccctggcaaggattgctatctgctcctcctcccaaccttctcttggctatgctccaaaacgccttctctcttgtagcacatccgatgtaagtttgcttcctatttactcccttagcactcaagtttcccctatgacagcatctaccacatgtatcgtaataccttattgaattatctgttccccaccccgccgtctagactacaagcaacatgagagcccaaatcccatcttccaattttttggtgattccttgtatttttataattttgccttgggttaactttattgaacagcatgaatctaacagtgcaaatttgctctctcttcctgtcattcattcaacatttttgttgtgtctacggggtgccagccactgttctaggtatgtgttgagcatcagttttaaaataagcatctttctggatgctgagcgtaggacaataaacctgaaaagatgggattgggctctcatgttgcttgtagtctagatggcagggtggggaacagataattcaataagatattatgatacatgtggtagatgctgtcttaggggaaagttgagtgctaagggagtgaataggaagcaaacttaccttggatgtggtacaagagagaaggcgttttggagcatagccaagagaaggttgggaggaggagcaggtagcaatcctagagagaaacaacagctcatagaaggtgctagaggtgagcaaagtcatcatctgtattagggagtaaagaaagctcaatatagttggtgcttagaagaaagaatgaaggtgttaagaagtgtggctgaagtggttgacagaggtggacatatcatgacaggcctcacaagccatgctttggggttcagactgtatcctaagagcctgggtaaaccattgaaaaatattttaaaatttaacttttattatagcaatacttgcacataatatacaaataattaaataattctaaaagtcttacacaaaaattatcagtcccttgaaggcatcatggcccctcaccccaaaggaaactacttccaatttttttttttccgagacagagtctccctctgtcacccagactggagtgcagaggcatgatttctgctctctgcaaactccgccttccgggttcaagcgattctcctgcctcagcctcccgagtagctgggattacaggtgctcaccaccacatctggctaacttttttgttttcttagagaaaaaaagtagagatggggtttcaccatgttggccaggctggttttgaactcctaacatcaagtgacccgcccaccttggcctcccaaagtgctaggatgacaggcatgagccaccgggcctggccacttccaattcttttaccttctagataatgtgagtaagcatctttgttttatagattttagacattatgtcttcctattatgacaaagaagaattttatttatttatttatttataatgtcaatttttattttagattcagggggtatatgtgcagattctttttacctgggtatattgcgtgaggctgaggttaggggcatggttaatctcagcaccgagatactgagcatagtgcccggtagtttttcaatgcttgcctccctccctttctctccccttttagtagacccccatgtctattttgccatttttgtgtccatgagtacctaaagtttagctcccacttataagtgagaacatgtggtatttggttttctgttcctatgtcaatttgcttaggataacagcctccagctgcatccatgttgctgcaaggacatgattttgttcttttttatggctacatagtattccatggtgaatacgtaccacattttttttcaatctaatccatcgttgatgggcatcaaggttgattccatttgacaaaggagaattttatatctcttatgctttctcttcctaatccctttattctttctaatacgactattttgtatttttcttacatttctatttataattttaattattgttccatgctgagtcaagtagtggactgtgattatattttcttcttgtataaattttcatttcctttgatgttgataattacattgcttgttctgcttagctttctttgaatctttggccgaatcttctcatatcattccacagctctgtaaaaacacttctactatcatctcatctctacttcctgtattacctggaacttgcagctttctagggttctatgtgggcaattttgcttgcttcttatgaaattcttaatttgcaggcactcatgtctgactttccctgctctgctgggttttgtagcatttttctatcaactttttttcttcatctcgttttctgttttcccccatttcaagttctatttatttctgatttaatcaaagatgaaatctgaattcctgtttctttctggaatagagttccagaagatctctactccatcttaaaactgtaattcattcatgagatttaagtagaggattctcatatttgctttgaataagcatctctctggcagcagtgtggaaagaatgaatctgaggggagttggattaggtttagggccagcaaataggtcagacgataagagactggagtagggtggtgttagtgaggatgcagagagtagtcctaacttagaaataattaggagaagaataatcaataatttttggtaagtaattggatgtgggagtgagggagaagttggagataagataatgaagataatgccctcatttttagcatggaaagatgagtagatggtaatatcatttatgacagtagagggcaccagaagaggatgggactttggaatggggagacatgagagttcagttttggactattgagtttgaggtgtctttgatacatttaagtagagacatcaaataggcaatattaaatggcatttgaaacccatggcagtggaagaaattaactaaaaccaagaggagagaaaagaggaattggatagaatcatcataaatgtcaacatctgatggctgggcagaaaaagaggaccctacaaagacgtctgaaaagctattaaagagagagagagtatggtgtcaaagaaaactagtaatgagggcttgtctagtggtcaagtatgatagactaaaaatatcttttaaatttagtgacataaaggccattgaagaccttggaaagaacaatttctgtggaatggtaggtgtagaatctgagtaataatgggttaaggagtaagcaggagatgcgaaaatgaaaacagtgaatgtataacattctttcaaatagtttggtttttaagaggaaaggaggagatagctcagtagctaggcaaaaatgtgatgtcaagtttctttttagttattttttctaagtgagatatttgagtgtgcttaaatgttaatggatagccaaataagagtagagatcaatgatgtaaataagagtagaagtcagtgatagagtgagggccttgagaaagtgagagggaagggtctacaaagtacaggtataaagcttaagattggaagaggaacgccacatccattgttataagtgggcatggtagagggccaggtaaatgtatcagttgatgaaaagttgagagaattcttgatggcttccgttgtctgtgaagtagtaaaattcaaggattcaaggttgtgtgcctacagtgaagaagaaataaatgatgggatctgagatctgaggaaagtgggaacaatttgaaatagctggtgtattgggttgaatagtatccttccaaaatagatgtccacctagaacttcagaatgagaccttatttggaaatagggtctttgcagatgcaattaattaagataaggtcattttgggctagtgtgggccctaaatctgatgactagtgtccttctaagaagagagaaacagtgacacggatgcaaacagtgggaagatggccatgtgaagacacaaaaagatacacagagagaacaccatgtgaagacaagaagagagtggaatgctgcacctacaagccagggaatgctgaggtttggccgggtgcggtggctcacacctgtaaacccagcactttgggaggctgaggtgggtggatcacttgaggccaggagtttgagaccagtctgaccaatggggtgaaaccttgtctctactaaaaatataaaaattagccagacgtgatggtgcatgcctatagttgcagctacttgggaggctgaagcacgagaatcgcttgaacctaggaggcaaaagttgctgagatcacgccactgcactccagcctgggtgacagagcgagactctgtctcaaaaaaaaaaaaataaaaaaaaagaaaacaaaaagacagagatgctgaggtttgttggcaaccatcagaaactagaggagaattgtgggacagacagattctccctcagagtgctcagaggactaaccctgctgactccttgattttggacttcaggcctccagaactgtgagagaaaaaatttctctcgttttgagccatccagtttgtggcaatttgttatggcatccgtaggaaacaaacaggaaaaaatggaaaatgagagtgcattaccaaaactcagaaagattataagcactgttgagaacttagttgaggttggtgatcatgaatttatgttggcaataaatgtacagcagcccaggattaactgtgaaaggtgaatagatacattaaagcaggattcatattctgtcatgcataagcagactatggacaaggtggcaataaaactgaaaatatttcaacagaatggatgcaaagatgatgaaataaagtgtgctttgagtaaagattaaagacttaaggtgactggaggcaggcagcagaggggttcaagggacaggctgaaaatagctatagtaagagaaattgagtaacagtcaaaataaggggttaaggtgagagagtaagatgaagctgaagcatttctaggccatgacaaattccaggatgtaactgaagtgtggtagagatgacatttcgatttcatcgaaaatgaaaatttcagggccagaaatttagatgggtcgtctatactatagtaaaaacttcactttctagtgattcttatcttttagtaaaaatcatgcttacaacgaaaatacaattcattggatttaaaagcatgttaaaaaaacagtgtatatctatataatagaaattcatatctactaaggggatgccataaaaaaatcaattggatagtctctctcttatttaatcccatggagaattacagaaagtggacttcatgttttaaatcaatgaaatgccaacttaaatgaagttgagttctattttgaaacttgaattaagtaatcctgaaatgtttcaaaattaaattcatcatcaaggcaccgaagtaaaaatgttaaaatataataaatctgtatctttctgtcagaattacaaatgactggtaccaattacaaagtagtcaacatcttattcataggccttaaagcataccaaaaatgactatcattggctatgtgatcacattttcatttaataagtgacatgtagaataattttgactcaaatagtttcaatactcatgatatgagtgcaaaacaaatatacaaatactacagattatcatctgtacagcataattaagaaagaccctgtcagggtacagatggtcttacacataaaaaagtggcattttttatatttctttacttataaaatcatccttcaactcatgggagtagttaaagaaactgagatagctattttgtaggtgagaagacatagggctaagatgataatttctttcacatagttaaagggctattatgggcagcaccattcttttttttattttttattttttattttttttttgagatgaagtctcgctatgtagcccaggctggagtgcagtggcgccatctcctgcaacctccgcctcttgggttcaagcgctttttctgtctcagcctctcgagtagctgggattacaggcatgtgccaccatgctcggctaatttttgtacttttagtagagacaggatttcaccatgttggccaggctggtctggagctcctgacctcaagtgatctacctgccttggcctcccgaagtgctgggattacaggcgtgagccaccatgccctgcctagacagcacccattgttaaactcaggcagtcagccccttccccctgcaatgggtcaacatgatgccccgagaaactctgagactcaaaactaggggactgtcttgagactctggccctaggacagtgacttggtgagaggatcattcttgctgaatggtgaggtatttctattgtgggattgtatgatattggccaactagactggtgctgacatgctgattttgggtgatatttattcccatcagaaaacaggaagtatctggggcactgggcaaccaaaaatcaatagccatgcaccagctttttcccttcatggtctttttcttaccatggtgaacatccagtctacagcacctgagggcagccctgtgtcctcccaccactgtcacccatcttccccacaggatctatgcctcgtgtcagggaatcatccagatttgactgtgcctatctcctttgagtgctttcaaggcttctattccatgattctaatgtgcctttgttagcaatatcacttattttcttcaactgatgttgaacacattgtgctctcccaagcaggtcttaagtcatgccacgtcagggctggaccgctcttcttattctgcacatgggccctcacttaggcaggggtgcggtcaacattgaaagaggttccattctaggaatgtagtggttatggcgttttctagtgctctgcattgttttgtatagacccatgtttccatctggtattatttttttaatgcctgaattatttcctttaacattttttttttttgtagtgcaggtaagctgataatgaactcttttaacttttgtatgcctgaaaaagtttttacttctttttgtttttgaaatatatttttattaagtatagacttggggctgacagtcttttctttcagtgctttaaagatgattcttcactgtctcttgcttgcatcatttccagtgagaattctactgtcatttttatctttgttcctctgtaggtagtgtgtcggctgcatttaagatttttctttttattactggtctttagcaatttgattatgatgtactttgatgtgtctatctttgtgtttcttgtgcttgggtattgtgaatttttgagggtctcaaggtttatagttttcgttaaatttgtaaacaattttatcatcactttaagtatttttttctttctatcccttttccttggagaatctacttatatgtatattagacctcttgaagttgtcctatagcccactgatgctcttttcattttttttttttttttttttttttttttgaggcagagtctcactgttggccatgctggagtgcagtggtgcgatctcggctcactgccacctccgcctctcgggttcaagcgagtctcctgcctcagcctcccgagtagctgggactacaggcgcctgccaccatgcccagctaattttttgtatttttagtagagactgggtttcaccgtgttagccgggatggtctcgatctcctgacctcgtgatctgcccgcctcggcctcccaaagtgctgggattacaggcatgagcaaccgtgcccggcccactcttttcattttttaaaaatttactttctctctgtgtttcgagtggtttctattgccatatcttcaagcccattaattatttttctgcagtatctaatcggctagtgatcccatccattatacttttgatctcccacattatagttttcatgtctagaaattttccatatcttccatgtttccacttatcttttaaagcatatagaataattttatagtaactgttttaaggtgtttatctgtcaattttagtatcaatgttagttctagattggcttcaattgatcgatttttcttctcattatggatcatattttcctgcttctttttatgcctagaatccttaattggaatgccagacattataaatttcacattcttgtgtgccagatatttttgtgttcctataaatattcttgcagttttttttctgggatgcagttacattacttagaaaccatttgatcctttcagtttctgcttttcatagttgttagatggaaccagagcagcatttagtctactgttaactattcccagctatggaggcaagatccttctgagtactctgtccaaggtcttatgaattataaaaatttccactatggctgttggagacaggcgctattcccagcctgtgtgaagactgggtttcctttagccctttcagatcgttctttctgtgcacatgggcaattttcttatatgcatgtgtttataaacattctggtgaattatcagggcatatcccctgaagatcttgagtctctttcctcacctttctgtcctgcaatctttagcttcgttggtcatcatgctctcaactctatctcttcaactcagagagcttgtcaggctactccctgcattgaagcctcgaacttcttaaggcagtcatctgggtcacttgtagggattcccatgtttgttttccatctttcagagatcactgacctttgttgcctaatgtgttcaaaacttttatttcatatattttgtctgtgtttattttgtttgtttcaggtgggaaaatgtatgtagccctagctgaagctgcctatctcatcatattttaggagctgttagtttgtaaggaccaatgaagtaatgtatcatagaatgctacgtcatttgatagaatagaggatgacatttgaccttcactttttttgaaaggatgctctttattaatattaacagaagaagatagaaagttcaaaaggtcttgtttgcttaaactgatgttaatcatgaaatttttaatctaagaaaagataattactgggacattgtggtaagaagttgaaaaagcatgtaacttgtctcacttctttcattactctcattgcctttacaaagggaaataccgtaagtattcgtaatcagagacatgatctcatcaccccagtccatagacttgtctccacatacaacgtcgcagtaagaggtagaaatagtagaatttatttatacatccagttattttgagaacaactctacaaattcattcaactaattgactaaatatatttggaatatgtatgtgtatgtgtgtgttcctatttctttctacttgtgtagggtagaatgggcagaatctagagtaactagaataattgaagcaatcacatctgagaaactgtgggaaatgcaggtcttgacatctttaacaagactgtaatatgaggaaaatctcctctttaattttcatcttaaagaatgtgaaagaccctaatgtttgcatgctattgtgacttgcttttatacctctgctctttatgactctcctattttaagcaatgagtatccttaagatctctgtaatattattagtacagaaggaaggaaggaaggaaagaaggaagggaggtggggaggaagggagaaaagaagggaagaaggaaaatgaaataaaactgtttattcacttgctaatttattaaagatgtagttgttatctatattaatggagtgccttgttttaaaaagatttatgggccaggcgcggtggctcacgcctgtaatcccagcactttgggaggccgaggtggttggatcacgaggtcaggagattgagaccatcctggctaacacggtgaaaccccgtctctactaaaaatacaaaaaattagccgggcgtggtggcaggtgcctgtggtcccagctactcgggaggctgaggcaggagaatggcttaaacccgggaggcagagcttgcagtgagccgagatcgcgccactgcactccagcctgggcaaaagagcaagactccgtctcaaaacaaataaataaataaaaaagatttatggcaacctacaagtatatatgcaatgtaaaaacagaataaaagacatgaatgagatggttggacaaagagaaataaaactgcagaatggttgacagtggagcaagtttagggtctcattctgtttgtgctgctataacagaataccacagaatgggtaatttataaaaaacagaaatttatttcccatatttctggagactgggaagtccaagattaaggccctggcctctggggagggccttgctgcatactatggaggggaagaatgctatgtcctgacttgctaaaagggagaagggtaagagagagagagcacctacttccatgagccctttttttgtgtcgctcagactagagtgtagtggtacaatcatagctcactgtagcctcaaactcctgtatgagcctttttcagaatggtattaatccatgcatgaggtcagagccctcatgacctaaacgccttctaggccccacatcccaacaccgttgcattagggattaagtttctaacacttgaatttctggggaacacattcaaatcacagcagtcagtacttgaaatatctagtcttggatacttgcaaacaataagttgaatgttgagctctaagctttctagcagctaatagcaacaacaaaaaagataatttaatctatttctggtgttccattgaagacaaattgtttgccatatacgtggctagaaactagataagttaactcattttattggctcattaactgtaaggcaattaggttcagtgatggctgccggcagtgatgacttttggctttaggacagttgaacaatagaccttatagagcagtaactaacaataagcaccagttttctgtgtaggccgatcctaagttatgccaagaaaagccatgccacctgcatataaaaaatgattatgttaatgctcttaagtaattcctccctttttcctgtcttcattttaaccttctccttttacgttagtgtcaacacattatcccatcatagcttttattctcctcaatccgtccccaaactgttcttactgatgctcactctagtcatggcattaaggtcacaggattttatgagcatcagtagcctgggaatagtttgagtttgttcagtttagtcactagttgattcgttttcacagaattagaaattaaagagcaaacagtaaaagtcccaaaaattgcatgttgctctcaatacatttattcacgaggtaatattgtataaccagagtcatgtctaaaggtgctgcttttcatgtctgacactgccctgcaaagccctggtttcagtttattggaagaaaaactgatataccctttattagaaggattacttcgtgaattaacaggttaataatttgggagcagcgtatggttatcattttaacatataagatagagtaatttttggaaactttcccatgtgccaaagcagggtacaaggcagagtacaaggaaaagttgcaggcctcaaggaacccggagtctggcggggaaggggacaagtcagcaaagttatgatgtgacctggtagtttggtgaaattaaagagagagaaacacgcagctcagttggcctgggagtggaagaggtcaggaaagactttaagaatgtaggaaatcttcaggcttgaaggaaaaatctcacatcatggaattgtggaaattacttaaattgggctttatttatttctctagaacccaaggcccgtgagaaccctgcagctgtcaatagccctcttagattttgagcaggactatggttaagcccttccagaaacctgataattgaactaacttgaaagttaaaaataaaagctgtggtagaatacacataacatataattgaccattagtgacacttagcactttatagtgtgatgcgaccaccatgactacctagttccagaacattttcatcacccccaaatgaaacgctgtatccattaaaccatacctcatctcttcctccccagatcctgacaactgctaatatactttatggatttgtcaattctgaatttttcatataaatggaacaatacaatttttgtatctggcttttcacttagcatagtattttttaggtttcgtccatattgcattagtgcatcctttctttttatggctgaataatactttattgtatggatatcccacattttatttattcatttttcagttgatgggcatctgggttgtttctactttttggctatcgtgaatagtgctgctatgagcaactgtgtgcaagttttcatttgaacacctgttttcattgctttggagtgtatatccaggagtggaattactaggtcacacagtaattttttatttagcttattaaggcactaccaaattgctttgcacagcagctgtaccattttactgaacttacctttaatgagaaagtatttccttcaaggttactgtgcaccttggtaaattattctccctaccaacttcaaaagattgttctgaggattaataacctttgtgaaacgttaaaggccttctgaaagcagcctttatataaattaaaggtattatgtactcaggcattcattccagtgtagttcacaaggagtttgatagttcaataaatttacataaaattcgatctggataggtgtgggcttttacaatcttataagacctgaagctgaaaagagacaaattgagctgaattagtttgtcttaatttgacctgtttttcctaataagatattggaggcattaaaaaagagtactatccttttgaagtatgagcacgctgatgctggttgttggatccattaattaatttatctctattcagaatattctaatgaactaaaacccaagattgctgttaatttaaagcagaagcaaaagcgtggctgaacagatgatgtttgccacgttttaacagacttccacaatggttcctgagagataaccaagtgaaaaacaaatttgaactattttgtggctctaaactgtgttttaaaactctaattaaggggggcagccagctcctattacatatctggtgcacgtggagcttttaggggagctcatcatcctagcaaagtgtttatgcagcacctgcatcctggatgggaagctttctgagaataacccatttcctaggtttgaatcaatccatgacttgcctaatggatcaaggtgccaaaatgagctcacacagcaggcacagaagccacataagatacccagagctctgtttttgtttttctctaatttaacatttctaaatggcctgaggttactcatcatctcttattaacctactaaagccccacattggctaaggtagatccttcacataccctgactcagtaaacacttgggaaagagttttaaaagtagtaaatctttaagtatctactatgtgttaatgaatttcaaatttgttatttcagatccttacaacaaccatgtaaagtaggtagtgctttttgtttgtttgtttttgagacggaatttcactcttgttgcccaggctggagtgcgatggtgtgatctcagctcactgcaacctctgcctcccaggttcaagtgattctcctgcctctgcctcccaagtagctgagattacaggcgtgcaccatcatgctcagctaattttttgtatttttagtagagatggggtttcaccatattggccaggctggtgtcaaactcctgacctgagatgatccacccgccttggcctcccaaagtgctgggattacaggcatgagccaccacgcctggctggtagtacttttatattcattttggaagcgaagaaagtgggtctccaaaggctaagtaatcagcaaagctaaaatacaaactgaaggatagttgattctaaagcctgagatcttgctaatataccagttaccttctcaaacaaaataagagggaaatgtaaaagtaacaagaaacattaaaaattaaaaaatatgttcctccaagtcaagacataagatacattggactattttaaaaatgtcttacatttacctgcccactagctaggtgtctgctgaggttgttctgttctttgagatccagatgaatttgactggaaccctcaatctcctgtgtggtgtgaattc

SEQ ID NO: 33 - DNA, 217623 bp, Homo sapiens
gaggaattcaatgcaactaccataagaataaaaatagaatctatgtataattgtttctatttggaaaaaattatttttcctttacttcttgacaattttccaacaagagctaagttgcccacattccatgttgctgtcttggagtggggagaaatctgtcttcaagagagcgtgagagccaactggatctgcatggtgtgtgaacaagacgggttacaatagaaaaacaaagtccaggctggccacttagcgtagctcatcttggatgcctccaaaaatctctaaatgctgctcaacttagccagaattgtgttaaacaacacaggataagagatgaaatcatgtttgagctccacttgtaatcagaatgccggaagggatggcagaaatctcctcccccaactcccgccatggagggagctaggtcatatgaaggaaggcaaccaccaatgacacccagctagctaatttggtgacagacctaggtccttgacaccttgatatttcaccaagctgcctgtcagtggtgtcgggtgaaacatccaaagtaatgttctcaacagcatgcctcacctcccaaatattttacaaatattatccaagaatgatgtattaagagtgagagtagtttctgtgattgttaactgccttaaacccccacatcctgttcatgttactggcgtctgcctttgatactgtatccatagcaatgtgcaaatattgtaaacactctgctgacccaggggttttcttgccattggctgaaggtgcagcactaatatgttgcacatgtacacagaatggccgtagttacagcatttatgaagctttgacatctgcacagccagagagcttgctggcttacgttctgcatatcagagtatttcctaggaaactgaaaataaatacattatgaaatttcaattttcagtgtgtcactagtgttgttctggcgtcctgtcatgcctgctgcaaaacacactttgaccaggaagggatgccttatgaaatctcattatatcctttcaatctgcagaagtcccacagaattccttctgtgttaataacaggaagatccaacatgaattaaaaactcactatgtgctgggtgttatgctagagccttgcttgcattctttcatttaattatcactttaaaccctaggaagtaggtgctgctaacccatttttcccagttagaaaacgggggccggccagatgcggcggctcacacctgtaatcccaacatttagggaggccgaggcaggcggatcatctgaggtcaggactccaagaccatctctactaaaaatacaaaaattagccgggcatcatggcgcacacctgcagccccagctactcgagaggctgaggcaggaaaatcgcttgaacctgggaggtggaggttgtagtgagccaagattgctccactgcactccagcctgggtgacagagtaagactctgcctcaaaaaaaagaaaagaaaagaaaactggggccaaatgaattaaataccttgtttacagtcagagctagtgagtgtaaaaacaaaaacaaaaacaaaacctagtgagtggtaggaaccaggaatcaaacctagatttcaaggcctgcatttgtatcatgtgttcacagcctaactattgtaaattgcagaggtgactgtagcacaaaatcgctccccagtattaatatattcacagtggggcgacgaagaccctggtgaaggaatgatagagtgtgtaaaagcagaggacccttcgtcagaggacacctgaggatgactgaaagaagctcggtgggaaagctgagcacttggaagaaccagggtaacaatgggacaaagtgaaagcaaacattctgcttctttgaatttcttaaggcatttattatgaaaagggggaatgaaaagttagtactcaggatttgttgtcactctttagcacagaaaagcagttttgcccatggtttccggaacaagggactatggagttggatgagtgggagagaattggaagagattttaaaaaggcgtataaagatggagcagaaattccagtttccatttggtcaatgtgggcactaataaaggcagctcttgagccatttcaaacagaagatgaggcagattcagatgaggaagaggaggacgagtgtaaaaaactaacttcagattctgagtgtgaggaacagctactggaggagattaaagaaaagaaaggaaaacttagaaaagcatgttttactagcccgtcagctccatctgctgaattaagtgaatggccacctcctctctctccccttaatgggagagaaaatgaattagctgaaaaacttactgctcctgtagttgcaacattaaaacctggagcaactggtggtgttgtataaaattctattcaaaaagctagagctgagggagaccttgaaacatggcaatttccagttactataacccagcaaggaggacagaatatagctaattgggccacttttccttttaagttactaaagaaatttaagcaagccattagtcaatacggaccaaactctccttttgtgcaaactttgtggaaaaatgtggctcttgataataggttattaccatatgattgggatacaaaatctgttctcactctgtctcagtatttacagtttaaaacctggtgggctgatgaagctcaaactcaggcaagggaaaacacacaagcgcatccacctgtgcctgtttcctttgaacagttaatgggagtttgccctaattggggtcgattagagaatcaagcagtaatggaggatgttgccattgttcagctgcgctctgtgtgcttacgggcatgggaaaggataaatgttacaggggaaaaatatccttctcccagttctgtccaacaaggacctaaagaaccatatattgattttattgcttggctccaagaggctgtatataaagccataactgataaaacagctgaggatgttgcaatacagcttcttgtatacgataatgctaatgcagagtgtcaaactgctattagaaccctgagagggaaagttcatttagctgaatatattaaggctggcaatggcattggaggtaacttacataaggctactcttttagctcaggctatgtctggattgaaagtaggaaagagtatgccccatttctcaggctcttgctttaattgtgggcaatttggacacacaaaaaaggaatgtaggaaaggaaatgctctctagtaatggaaaagcctcaaaaggttcaaattcaaagagataattttaaaaccttaaatgatttccaaaaattcagctgaacaacacctgacaggacaaaaggaaaataaaaaggctagacaagatatatggtggagggatgcacatataaagagctgggaaaaaagaaatataattatatggggaagaggatttgcttatgtctctccagatgacaatcaggtgcctgtgtggctgctcaccaaaaatctgaagatctatcatgaaccacagcatctagtggatccacttgtacagtgcaaattgaagttttaaggattgcttttttgctatactgttgcacaagaaggataagcctcgattggcttcctctatgccttctgttaatcagaaaaagcctgcttctcattatcagtggtaagttttaccccatggtaattaaccaaagaggcagaagctgggttacaaatgcttcagcaattaaaaaaaacagaaaaggcctttgcttctgtttcagcagatttactaacgtggggatgaggatatgcttgtgtttttgcaggagatgaacaaactgtgtgggtgccctcaagatgtgtatgaccatggaacgggagactggagggacccatggatcccaaccatggaccaggttcccccagtacgagccatgagccagttgaatctgaatgcaaagatggaatgaggactgaccagagtcacgctgacatcaacccccataacatggggagagatcaagaaaaccacacaggaagctgagaaactgctggagcgccagggttttaccttttgctgggattcagaggtacagtagatgcttaacggaccaacgctttctgactgaactcctctctaccctgaataaaagagaccctaatagctaggctggaatatcattgcccctattcagcatgaaaaagttacagaagacgggccttcatccttctgcaacccttagaattaagggtcctcttgtgaaagggaaaggggaaatatgtaagaagcattcaaaccagagcaactccattttgaataaggactaagaaaaatgaagctggatcaccaactggcaattaagggctgcacagcctgcaattgccttgctcaattaatttaaaaacaaagaggaccttttggattcaaagctgtgttatgttactgttaaatgccatctggagggcagagatgaaaatctcaccctcgatacagtaaagctaaaacagcaggtttttgaagcctctcaggctcacttgaacctgctccctggaactgatactttgaacaagacagccaatgggttgtctgcaattgatcctcttaaatggactaaggtcattggaagctctacacttgcagattttattctaataattatgtgcttgtgctgtctccttttagtctgcagatgcaggagctgccactggagagaaagctgccatcgagaacaagcaatgatagctatgctggttttacaaaaaagaaaagagggacatgttgggagaaaagctgagtgttgggagagaagctgaggcagggcttggaacatgtccaggatccagggtaaaaccactggtggcctttggaatgcgcccagacttactggctccttgcttctagcactcccattatctcaagtagccatatgtttcaaagaaaatgctaaaccattacagctgtagttcattccttgatacaccacttccttttaacccccacatcctcgccatctgtttctttgtttgatcaccaatgaatagcatgggctctcagagctcgaggccttcacggcctccatactagcattggccccctggtcccactttctctctcaacttgtcttttctcattcctttgactccaccagacttcatagcccccacggtctggtgttgggtctgatcaccccaacatccaccaccatgcctggctaatttttgtatttttaatacagacgggatttcaccatgttggccaggctggtctcgaactcctcccaaagtgctgggattacatgtgtgagccaccatgcccaaccatcagtaaacctttaatattgtctgggatccaaacaggcccagcaaacaaacagccttgccaggaattgttcttcatgggtggggatttgtggatgcagtgccaagactctcaaatggaaaagagtaaggacttagagagcaagattagaaggcagaagatgtggcacttcactagccatgcaaccttgaacaaattatttcacctcttttttattttgagacaaagtctctcctctctatcacccaggctggagtgccgtggcactatctcagctcactgcaacctctgcctcccaagtccaagtgattctcatgcctcagcctccaagtaggtgggattacaggcatgcaccaccatgcccggctaacttttgtatttctagtagacatggggtttcaccatgttgcccaggcaagtctcgaactcctgacctcaggtgacccacccgctttgacctcctaatgtgctggtactacaggcatgatccaccatgcctggcctcatttcacctcttaaacttgggttttcttgtgaggcacttacacttgatttataagattcctctcagttttaaaattccataaaattccagaagcactatctgggagaattagtgagtcccctgggagaagtagtgagtcccctgtctctggaagcattcaagcagagtgagaatagtccgttgtctgatctgctgtagacaaaattcgtacattaggtaggaggttaatatttgatttgaataattaagtcaataataaaaaatagcattgagtatgtaatatgtgcccagccctgttctaagcatttacacgtctcatttatttgatcctttcagtaattgcaaggggggtggggggtagatactatccctattgtacagaggatagtctgatcagaggcagcactaaccagagatctcacagctagggagagatggagattggaaatcagattgctgtggcccccaccaagtcctaatccccacccaattctgtcagcagactccgggctctggggtgggcgtgtcttcccactggcctgggatctgggtgcaaggtgacctgcctgcctcctatctgtctccctctgaggcagggaattgagtgtggaatgcagacagcaggcttgccaacaaagccgctttcccacagcctgcagcagaaagctgccttctgctgcttggggctacaaatgctctgagcccttcaccagcagccttattttacagaaggcgaaactaacacccagaaacggcaagctacctacccaaggtcacagaacaaacaagtggcacagttgcctggagtcctcacttcctggccagtgctcgatgttctgttttttttttttttaatctaaatcatatgactgcaatcgcttgcatatggcagtccctcggttttctgttctgaatatacatattttctttgtttcgttttgttttgttttttcctttgagacagagtttcactcttgttgcccaggctggagtgcaatggcgtgatctcagctcactgaaacctccacctcctgagttcaagcgattctcctgcctcagcctcccgagtagctgggattacaggtgcctgccacaatgcctggctaattttgtatttttagtagagacagggtttctccatgttggtcaggctggtctcgaactcctgacttcaggtgatccgcccacctcagctcccaaagtgctgggattacaggcatgagccaccatgcctggcgtgaatatacatattttctaatcaaggcctatgtatcaactacagcaaattggagattcacaacagcggcaattattcaaaatgaaactctctgcctattatattctaaaaattctaatccaacctcactgctgcacaagatatttatctcttgttggtcctgaatccacacttgtgctcctttgaggcaagtttcctcactaacattgagccccctaattacatattaacctttgccccagctgtcacccagccagaattctccctgcagtcctctgcttatctggcctgctgggaactcaggatcaaacagcactgagaattcaacaattatttctttcttcttctttttttttttttctcaagatctgcttttaggagaagcaatcatttcaacactgcattacaaatgaatttatacctcagtcagaaacaagcaaccccacaccccactccactccccactaagcttctctctttttttttttttttggagatggtctcatgctgttgccaaggctggagtgcagtggtgccatcttgactcactgcaacctccgcctcccgggttcaagcaattctcccacctcaggctccagagtagctgggactacaggtgcgtgccaccaagccaggctaataattgcattttttttttttttttttttttgagacagaggctcgctctgtcgcccaggctggagtgcagtggcgcaatctcggctcactgcaagctccgcctcccaggttcacgccattctcctgcctcagcctcccgagtagctggaacaacaggcgtccgccaccacgcctggctaattttctgtatttttagtagagacgaggtttcaccatgttagccaggatggtctcgatctcctgcctcgtgatctgcccacctcggcctcccaaagtgctgggagtacaggcgtgagccactgcgcccagccaattattgtatttttagtagagacagagtttcaccatgttggccaggctgctctcgaactcctgacctcaagtgatccactcacctcagcctgtcaaagtgtcaggattacatgcatgagccactgcacctggcctcttttttggtttttatgggcaatgtgtactctcagatcacacgttggtttggggatcaacctcagagtaagatgcacattcacattctggaggatgacacagttaggaacaggctttagaatccagtgtgaccttgggcagatctttcatctgttctcaatcgcatttgtaaaacacaggcaaagactgtcgcaacctcacaaacaatgtttgctgaaaggagaaatgagtggttttctgggccactccattctcatcccgtcactctcatgtcgcacttcatcctcaagtgtagttggagattgtcatcaacttcatccctcccgcccacccctcgttggcatcaaggtcacctccagtgggtactccacactgaggaactgtgccctttgccactcagctggggcccaaagctctgttctccacaaaagtcataaagggacactaatggagatactggaaaatcttactacatagaaatatgaaaagttctgtgttaaaactattgtaagcaaactgagaaaacaatcatgaaactgggagaaatatgtgcaactcatagcacgggcagaggtgaacttccctaatacaatgaagcctactaacacaaaaagaataaaaagaaataaaggatataaacatctaggtcacagaaaaggaaatacaaacagttctggacattttatttctttttttattttatttctttttatttgagatggagtttcactcttgttgcccaagctggagtgcaatggtgtgatctcggctcaccacaacctgcacctcgcaggttcaaccgattctcctgcctcagcctcctgagtagctgggattacaggcatgctccactacactgggctaattttgtatttttagtagatacaaggtttctccatgttggtcaggctggtctcgaactcctgaactcaggtgatccacccacctcggcctcccaaagtgctgggattacaggcatgagccactgtgcctggccagccactgagcctggccttattttttaattaaaaaaaaaaattgccaggcacaatggctcacatctgtaatcccagcactttgggaggcagatcatgaggtcaagagatcgagaccatcctggccaacatggtgaaacccccactctactaaaaatacaaaaattagctgggtgtggtggtgtgcacctgcagtcccagctacttgggtggctgaggcaggagaatcgcttcaacccgggaggtggaggttgcagtgagccgagatcacagccactgcactccagcttggtgacagtgagtctccgtctcaaaacaacaacaacaacaacaacaaaacctaactaacaaaaagcaaaaacgactgaactaagagaacaattttccatcacgttgaggaacatgtttaagagttttatggccaggcgcggtggctcacacctgtaatcccagtactttgggaggctgaggcaggcagatcatctgaggtcgggagttcgagaccagcctgaccaacatggagacaccccaactctactaaaactaccaaattacccaggtgggatggcgcatgcctgtaacctcagctacttgtaaggcttaggcaggagagtcacttgaacccagaaggcggaggttgcggtgagccgagatcgcgccattgtactccagcctgggcaacaagagtgaaactccgactcaaaaaagaaaaaaaagagttttatgggccggtcgtggtggttcactcctgtaatcccatcactttgggaggctgagcctggtggatcacctgaggtcagaagtttaaggctagcccggctaacatggtgaaacctcgtctctactaaaaatacaaaaattagctgggcatggtggtgggcccctgtaatcccagctactcaggaggctgaggcaggagaatcgcttgaacctgggaggcagaggtggcagtgagccgagatctcgccattgcactccagcctgggtgacgagagtgaaactccatctccaaaaaaaaaaaagagttttatgacatgcttgttggagccgtgggaggaaaaaggcattttatacactgaggatgacagtgtatattaaagtcagttctgtaaggcaatttggcattatcagtcaaaatcacaaatgcacagaccctttgactcaggaatacagatatattctgattcatgcaaaaaatgtatggacaagatttttcattgcaaaattgtcatatcatataataggattttctgcacctgtaaaaaaagaatgagaaagttctctcatatactgataggaaagatctctaagatgtaagcagagacaaatgtgtataagtatgctaacatacacatatgtatcttcttatgtagtgtatgaataaaataactgtggaaatgtataccatattattgtataatgcaagcatacatttttattctgcttgtatatgattttcctaaacttatacatatttactgataatctacataatgtttatgtagatttcaatctgcgtttaacaaaattgaattattacgctaatgaattttatttcaaaaattatcttttggctgggtgaggtgactcacacctgtaatcccagcactgtgggaggctgaggcaggtggatcacctgaggtcaggagtttgagaccagcatgactgatatgatgagaccctgtctttactaaaaatactaaaattagctgggcgtggtggtgtgggcctgtagtcccagctactcaggaggctgaaacaggagaattgcttgaacccgggaggcgggggttgcagtgagcggagattgcacctctgcactccagcctgggtgacacagcgaaactccatctcaaaagaaaaaagttatctttcatggtatgtctactttagaataatttcaaagatctttaggtaactcaaaaccttgtactcatttaattgatggatatctgctgggtacataaataatttctaggaaaaatgaaagactaaaacatgcattatgaagcataatttaagtgtatatactttttttttacacttgtgggtttttcggggttttttttgtctttttttttcctttttgtggagatcagggtttcactatattgcccagccaggtctcaaactcctgggctcaagctatcctcctgcctctgcctccctaagagttgggattacaggcctgagccaccacacccggccttatttatttatatatattttttgagacagagtttcactcttggttgcccaggctggagtacaatggcatgatctcggctcactgcaacctccacctcccaggttcaagtgatcctcctgcccccagcctcccaaatagctgggattacaagtgcccgccaccatgcctggctaatttttgtatttttcgtagagatggggtttcaccattttgaccaggctggtcttgaactcctgacctcaggtgatccgctcacctcagcctcccaaagtgttggattacaggcgtgagccaccgcacccggccttctgtattttaaggaaaacaaagaactgtagttttatcttaaagcagcagttttgtcttaaagtacccagatttggtttggggcagggggtttgggagttttttgtggttggtttgtttggtgaaacctctttacacacctccaacatattgaggacaccaaagagctttctttgtggattatagctattagtatttactgttaaacatttaaacataactttctaaaaaacattttttcattcctctcagcacatacctataaaacatactttttttttttttttgagatggaatctcgctctgacacccaggctggagtgcggtggcatgatcttggctcagtgaacccaagacatcccaggttcaagtgattctcgtgcctcagcctcctgagtagctggaactacaggcacctgccaccacatccacctaatttttatatttttagtagagacggggtttcaccatgttggccgggctgatcttgaactcctcaggtaatccactcactttggcctcccaaagtgctgggattacaggcgtgagccaccatgcccagctgctataaaacataacttttaagaaagcttatttaatgattcatttaaaaatagcaacaatgaatgaagtacaataaatatacctcagcagtattatgaaattagttctgacctcatgggccccttgagattggtcctaaaataaagggcgagtttactatagaatgcaaaagagcatgctgacatgattttttttttttttagatggcgtctagctctcttgcctcggctggagtacagtggcactatcttggcttactgcaacctctgcctctcgtgttcaaacaattctccttcctcagccccctgagtagctggaaatacaggcatgcaccaccatgcctggctaatttttgtatttttagtagagacaagggtttcgtcatgttggccaggctggtcttgaactcctgatctcaggtgatccacccaccttgacctccctaagtgctgggattacaggcatgagccatgcgcctggcctgaagtgaattttatttgctttgatttataatacctgagtttgggggctggacgcagtggctcacacctgtaatcccagcactttgggaggccaaggccagcgaatcatttgagcccaggagttcccagtccagcctagccagcatgggaaaacctactaaaaaatacaaaaagtagccaggtgtggtggtgtgtgtctgtaagttccaaactattcgggaggcttaggtgggaggatcacctgatcccaagaggcggaggttgcagtgaacagagatcgcaccagtgcactccagcttgtgcgacagagtgagaccctgtctcgattaaatctatatttatatatataatgtgtgtgtatatatatatacacacacgtaacacattatatatataaataaaatacttgattctgaaatatgttagacactatgaaatgttattaagatcttatagggccgggcgcggtgactcacgcctgtaatcccaacactttaggaggcggaggcgggcagatcacgaggtcaggagattgagaccatcctggctaacacggtgaaaccccgtctctactaaaaagtacaataaattagacgggcgtggtggcagacgcctgtagtcccagctactcaggaggctgaggcaggagaatggcgtgaacccaggaggcagagcttgcagtgaagccgagatcgcgccactgcactccaacctgggcgacagagggagactctgtctcaaaaaaaaaaaaaaaaaaaaaaatcttataaaagtttgcttttataagaccatacggtttatcatataatgtataatattttataatatataatgcatataaaacacatcatatgcattttaacacatgaaatttactaacaatcttaaaaaattttgtttaatattcatggccttgtttccctagtttactgtttgttgtcttcacctatactatgaagggttattctttttttctatgtaaatctacctagatagcaaagattcagtgttttaccagaattattttttgattttcatgttgattttattatgcccttggttatttaaagaaacaagatttgttatttaggagggagctaaagttctttatgatcatgttattttctatctttatttttatttatttttatttattttcttttttttttagagacagagtttcactcctgttgctcaggctggagtgcagtcatgtgatctctgctcactgcaatctcagcctcctggattcaagtgattctcctgcctcagcctcccaagtagctgggattacaggtgcctgccaccacgcccagctaattttttgtattttcagtagaggtggactttcaccatgttggtctcaaactcctgacctcagctgatccatctgcctcggcctcccaaagtgctgggattacaggagtgagccactgcacctggcctatttttaaatgttgtattgtctcttacaaatgggtaggcaagtactacttctcagatgcctatgatcctacactaagtattcaaatctcctgacaattttgtattttgcattcccaaaattagtcctaaatgtgaaataaaataaaataaaaggaatgatagctgagctttcccagacataccattgaaaatcacaaaagatttgttacttccccttatgaaaagagaggtgccagaaataaataggtgtatttgatatgttactattggtgaattacacaggaatagatgagattattttttatcaaaagagagggaaagtgtaggaaaattttctttcaatggaaaattaagtattgtctatagcacaccctttcactttatctgcttttgattccatgggagccattttacagcttgtaaaatgtagataactgatagaaatgaaaactaattcttggctctagatctgtacatttaatcctgccagtagaggttcaattgacttccctttcccaccctggaagaagctggcttgagctctgttggtgaatgtgtttcaacattcctttgctccatataattgagcttttctgacttctcctttgaattagttataatctgccattggagagtcatgattttatcttttttttttttttttgagatagcgtcttgctctgtcgcccaggcttgagtgaagggatgcaagcttggctcactgaagccttgacctcctgggctcaagtgattctccaaactcagccccctgagtagctagaactacatacatgagccaccatgcctggctaatgacgatgatgatgatgatgatgatgatgatgatgatgatgtagcagggggttgcactatattgcccaagctggtcttgaactcccagccttaagcgatcttctcacctcagtttcccaaaatgctgctattataggcatgagctgccactccaggctgatgattttatctttttaataaatgaatcttttaacaataaggacaatataagttagttcattacaaatgatggaagcttattgcattagagttttattctcctccttaatccttgttgcaaatacctggaaggcagtaacggaaagaccattagctggtattaaccttcaactctggaatatggcaccatctcctaccttgcccctggcagttactttcctcccctacacttatgcagcctcctagctggttggggctatactatcttccctccctacaccagcaggtgggactggatcaagagtcctaggcagaaaagagagggagagagagagagagaaatcaaacttgtgaaaagaagggggaagctgggcgcggtggctcacgcctgtaatcccagcactttgggaggccaagtggggtggatcatttgaggttaggagttcaagaccagcctggccaacatggtgaaaccctgtctttactaaaaatacagaaattagacaggtgtggtggcgcacacctgtgatcccaactactcgggaggctgaggcaggaaaattgcttgaacccaggagatagaggtgcagtgagctgagattgcgccattgcactccagcctgggcaacagagtgagactccgtctcaaaaaaaaaaaagaagaagagggaataaaagaaaattaaacaagagtcccagtcctggaaggaaaatatcaatcctagtctggaagggaagagaagcggagcaggtttagaggttagtcctattgtattcattttatggggtcggtgcagcagctgagttgacataaagatataaatgaggcttagggcaaggagatgaatattttaagaaactttttattgatggatcatgtatatacattttaagaattaaacacacccatgaaatcagcacccagaccaaatgacagaacattaccagcagctcagaagcccccccatttctcttgcaggaaattgatactgagttcttgtggcatggattaattttgcttggtttgtactttatatcaattgtattatacagcattttttgagaaaatttctttcatcaattgtattttcatccataatgttgcatgtagtggtaggtcattcattctttagtctgatgtcaatgggaatttgagtagtttccagcttaggactattataatagtgcagctatgatcattcttgtttttcttttctcttccttccttccttccttcctctctttctgtctttctctttctttctctctttctttctttctctctttctttctttctttctttctttctttctttctttctttctttctttctttctatctagggtctcactctgttccccaggttggagtgcagtgatacgatctcggctcactgcagtctctgactcccaggctcaagccatcctcctacctcagcctcccgagtagctgggactacaggcatgcaccaccacacccagctaattttgtatttttagtggagatggggtttcgccatgttgcccaggctggactcaagcaatctgcctgcctcagcctcccaaagtgttgggattacaggcgtgagccaccacacccatcttgatcatttttatccatattttttatgaccatgcatttctgctaggtttatgcctaggaatggaattgccaggtcatatttatttctatgtctgtcaatctgtgtatatattaaatacgaggagctcatgccaatgcctcttattctaatttaacacaacagggttcactctgcccttcccttttcatttgtagttctttctttgacagtgagaagcctacctcccactaaatacaatatatttacttaattgctcaatcccagaataccgataaaatagtttcagagttggtaacctatattccctagctctgtctgctgagagggcctagaggcagtgacaccccagtaacaatgaggacatccagtacccagatcttagtttctaaataccattccctcaaaaaaggaagcagagttttttggagaaatgattaagtatagggcggggtcagtgaaattataaaataatcctggaacatcttatgtcagaaagaaagtgctcaaaatacaataagggcatttcaaacaaacacaggggggtgacttgaagactctcacagtggctgtacctgggacaactggagcaatgagacaaatgatgttggtcatgaattatcactggcagaataaactaaatatccacgagtctatactgaaataattgcaaaagtaattgggaggcaagggacagctgttccttaccaatgaattacaattaataaatagagaaggaattgtgaaagtagaaaaatcacctgttggaaaacacagcggtaatgattattgcagacaagaatcgccaatgaatgccaaaattgctgggtgaaagtatgataataaacaagatatttgcatagtgtccaagatatctcctcataagatactcattaagttcaaaaggaaaaataggattttgcaatggagaaatctttgccacatcgtctctcaaagttatcatctccagtaatgggatgctgcaatattacatgtgcctcctgatataatgcatggggaagggtataacctcactcctgtggtgttctcaccaaaaacacataacgtcattctcattttgagaaagcattatacaaactcaagttggaggacattctacaaaataattggccagtactcttcaagagtgtcaagtttacgaaaaacaaaaataactagcctggatgcttcaaaactgtcaaaattatgagaggaggagaaagactgaggagctgtcctgaatggaaggatcctactgagacacggcagcggaatgccacttgcagtcctggattgcattctggagcagaaaaaggacgtcagtggcgctactggcaatactgaataaggcttgtggattctcacacagtattgcattaatgtttgtttcctgactttgataattctgtagctatgtaagatgttaatatttggggagggtgatgaaggttgtacaataatttgctgtactctttttgtaagctcaaaattatttccaaggaaaaagacaaaaagaaagagggaattggatgggattgtgtcattcttcagccaaaaaccctgctggcacctctgcctacagcaagaaagtttactcttttgagagtggcatttgaggccctccctaatctgaccaaaacttcccccagatttactgcccactcacctgtcacccacccacctttgttaaactccatggcatgcaggatgcactgcttagaaaactcctactcatgttcaaagacccctttgtgaggcctttactttacacctccttcaggaagcagagttagctgccagctcctccttggtcaccagtcatctctcctggaaaccttgatcctcctccaggaccactgcaggcctagctggcattactcacaaccctttctgccctcaggagatttataacctacaagtacatacagcaaagaaaacatagtgacaggcccaggaaagcaggttagaggcaggtgagcaagagaatttacattgtgttgtgaccatagatgttattattactccatctttgttgatgaggctcagggagaggaggtgaactgcctgaggctacaccaccaataaggacaaagtcacgatttgaactcaattcctctgcctcctttactaagagatactaactcagaaatgctctgaacagtcagccaagcaatgtcttcagacagtttatattttacttcaactctcacctcaaggagccaaaataagatcatctccctagagagcattgcagagaaaattctcaaagagcttgagggaaatgccaacccactcctacccgctgagcccacagggaattcaggaatcatagcttgacagattctcaggaaatagtcatggatttcacaatgaactgaattgacacttagcaatgtgaatctgctgcaaaaacatctcaaaaccgagtaagtggataccaggcactatgggtggctgagttcttttgctggaccctccatttaggccagttttctcctcttctaaacatggatttatcacttcaaaagacactggttagaaaactgctattgctaagctctgggataatcacagaacccatcacatagggtagcagccaagattaactgaaaaatagactatgtagccatggaatactactcagccataaaaaggaataaaataatggcatttgcagcagcgtggatggaggtggagaccattattctaagtgaagtaacccaggaatgaaaaaccaaaaatcatatgttctcatttgtaagtgggaactaagctatgaggacgcaatgcataagagtgatataatggacttggggactgggggaagagagtgtgggagggggtgagggatagaagactacacattgaatacagtatacactgctcaggtgacaggtgcaccaaaatctcagaaattgccactaaataacttatccatgttggccaggcacagtggctcacacctgtaatcccagccactaaataacttttcttttttatttttactgtaccctttcttttttctttttttttttttttggagacagagtctcactctgttgcccaggctggagcgcagtggcgcgcagtctctgctcactgcaagctctgcctcccaggttcacgccattgtcctgcctcagcctcccgagtagctgggactacaggtgcatgccaccacgcccagctaattttttgtatattttttagtagagacggggtttcaccgtgttagccaggatggtctcgatctcctgacctcgtgatccacccgcctcagcctcccaaggtgctgggattacaggtgtgagccaccatgctcagcctactgtaccttttctatgttcatttaaaagtaactgaaagagtacatacaattggaatgtttgtaacacagaaaatgataaatgcttgaggtgatagataccccatttaccttgatgtaattattacacattgtatgcctgcatcaaaacatctcatgtgccccataaatatatatctactatgtacccataaaaattaaaaaaattttaatcagaagaaaataaatctataacaaaatttttacaaattaaaaaaaccagactatgtagtacttcacactgggttagacgatgaattcgaaatcatgaatgttggctgttaggaatataactatttattataactgttaatattatgattattattattattgagacagagtctggctctgcacccagactggagtgcagtggcacgatctcggctcactgcaacctctgcctcccatgttcaagcgattctcctgcctcagtcttcctgtagctgggattacaggtgcacaccaccacatccagctaattttttaagaatatttttggtagagatggggtttcaccatgttgaccaggctggtctcgaactcctgacctagagtgatccacccacctcggccttccaaagtgcgaggattacaagataagccactgtgcctggccaatatcattattattattattattattattattattattattttgagacagtcttgctctgtcatacaggctggaatgcagtgatgcaatctcagctcactgcaacctctgcttcccgggtttaagcaattctcgtgcctcagcctcccaagtagctgggattacaggcatgtgccaccacccctggctaattttttttttttttttttctttctttctttctttttttttttcttttttttttagtagagacagggtttcaccatgttggccaggctggtctcaaactcctgatttcaggtgatccgcccacctcacctcctgaagtgctgggattataggcgtgagccaccacacccggccataactgttaatattaaacctctaccctcattctacactttgcttctccctgtaccaagcggatcttcctatcttcctacatcttctcctacctgggaggattcagggccacatgtaagaaagggggcaaaataaaggggttatgcctattgcagcacaattcataattcccaaggtacagaaccaccttaagtgcccattgatcaatgaatggataaagaaaatgtggtatatatgcactatggactactactcagtcataaaaaggaacgaaataatgtcttttttgttttttttttttgagatgaagtctcgctctgtcacccaggctggagtgcagtggcgcgatctcggctcactgcaaactctgcctcccgggttcacgccattctcctgcctcagcctcccgagtagctgggactacagatgccggcaaccatgcctggctaattttttttttttttttttttttttttttagtagagacagggtttcaccgtgttagccaggacggtctcgatctcctgacctcatgatccgcctgcttcggcctcccaaagtgctgggaatacaggcgtgagccactgcacccagcagaaataatgtcttttgaagcaacttggatggagttggagaccattattttaagtgacgtaactcaggaatggaaaaccaaataccatatgttctcacttataagtgagagataagctatgaggacacagagacatacagagtgatataatggactctggaaactcagaacggggaggatgggtggggagtgtggaataaaatacgacatgttgggtacgatgaacactacttgggtggtgcacgcactaaaatctcagaattcaccattatacaattcattcatgcaaccaaatataacttgtacccccaaagctactgaaattttataaaattaataacaatttaaaaagaaacagttctctttctgcctccactgccaccatggctcccgggaaaaagcttgtggtgaagaggggcaaaaaaaagaagcaggttctgaagttcagtcttgattgcacccaccccgtagaatatggaatcatagacgctgccaattttgagcagtttctgcaagagaggatcaaagtgaactgaaaagctgggaaacttggcggaggggtggtgaccatcgaaaggagcaagagaaagatcgccatgatatctgaggtgactttttccaaaaggtatttgaaatattacaccaaaaaatattcaaagaagaataatctatgtgattggttttcgtagctgctaacagcaaagagagttatggattacattatttctaaactaatcaggacgaggaagatgaggattaaatttcatttatctggaatattttgtatgagttcttgaataaaacttgggaacaaaaaaaaaaaaaagaaaaagaaacaaaaaacttcttatttttttctttttttgagatgggtctcactctgtcacccaggctggcatatgcagtaatgtaatcatagtttactgccgcctcgacttcccaagctcctgccatccttccacatcagccccctgaatagctgggactacaagtgtgtgccaccacacccggctaatttttaaattttttttgtagagacagggtatggctatgttgtccaggctggtcttgaactcctgaactcaagccaccctcctgcctcagcctcctaaagtgctaggattacaggagtgagccactacttccaacttcaaaaaaacaaatctcaacccatcaagtcgccccctccttttccttcccccgagagacatccacattcacacttcactggctcactttctctggctataacttctgtgccttgggttagtagcccctcttcatctgtgcagaatgggctaggtttgcccagtgctcactgagagctctcccggcgtgggtctttctggtacctctggaaatcttctcttgtgccaaaggaagaagacaaggaggctttgtacagctcaggccctcccagccactgacgctcttttaattgggctgtcctctcaccccatctctctccccaaagagatgaccagcccctatttcctgtttcctttggccctttgcctttgggtatggattgggagagcaagcccctgccagatttcccaccacttgtgccccggcccagccaggctgggaggacctgagcacatcctgtagcattgcctgtggaggcagtacaggtgcctgggaggcaaatccctaactagtctctgtgtgccctgggcccacctcctaacttctccaagccttacattctgtatgctcccatgaccctggcaggtagcctcacagtccacgcagattgtgacggtatctgccagggtcatgggagcattaagtgaaagagaaacgtctgcacattagggcacttcattcatgcaggtggttatgagcgttctcccctaactgcacagggcttgccactctgcgccccccatatcccattcatccctttctcacctccactcttcagattctctatttagtgcctttcctgggacttcagagtcaagaggcctgatcatgcagaggaccatgaattttggaatcggatccacctagcttccaaactgggatctgccaccctctactcttgaatcagatatacttaatagatcttatttttttaaatggggataaggatatctacttgataggtttactgatgcaaggattaaatagggtaatgcatatacagccttagcacaataccaggttcagagaagtttagcaaataatagaataataataaataataagaggtatgactagatccagctggctacccaccttgctttgaggcctggtatatggttggcatatttctctagttcctgccactgatgccggtctcccctatctttaatttcactggtcactttcaagaatattggaaggaggaggtttgtcaactgggtccactggctccatactatcattttgcccaggagtttccctttacatgtttgggccagtttctgttggtatacagaaataaattgatttccaaacacttatcttaattttttttttttttttgagacaaattctcactctgtcgcccaggctggagtgcagtggcacgatctcggctcactgaaacctccgccccctgggttcaagcaattctcctgcctgagcctccctagtagctgggattataggcgtgtgctaccacgcctggctaatttttgtatttttagtggagacagggtttctccatgttggccaggctggtctcgaactcctgacctcaagtgatccacctgcctctgcctcccaaagtgctgggattaacaggcatgagccactgcacccagccaaacacttgttgatagtggcatctttttttattttttaaatttttaatttaattttaagtttttaaattatttatttattttttagaacagtgtctcactctgtcacccaggctggggtgcagtggtgtgattatagctcactgcagcctcaaactactaggcttaagcgatcttcctgcttcagcctccccagtaataggtgtgtgccacaacgccccgctaatgtgtgtgtgttttttttaatttttagtagagatgggatcatgctgtgttcccaaggttggtttcaaactcctgggctcaagtgatcctcccaccttggcctcccaaagtgctgggattataggcatgagccaccatgcctggccaataatggcatctttacctcattcctgatttaataaagaatacatttctcctttctctgttatgtacagatgaactatttaagataaaagtagttggcggggcatggtggctcattcctgtaatcccagcactttgggaagctgaggcgggaggattacttgagcccaggtgctcaagaccagcctgggcaacacagcaagacccctcgtctctatttttattatttttttaatttgaaaaactataaatataaaaattaaaggtagttatcttgttaaggaaatgtcccattatttcctttatttttatcctaagtttgttgttattactgtttttaagttagggaggcctgtttaatttcatcaaatatggtttcagtatttattgaaattatatgtctgttttgcatttttgtttccttgaccttgtgacagacatgatgtagagagattttcccagaactcccctcggaaatgagtagctagccaactactttatgttcaaagtagtggtaaaaggatggactaggcaataaagagcattaggacatttagatacccatttagggaaaaatttaagtttgattccttccttgcaaccacataaaaattctagatggattagacattagaccttgagaaaaccttaaaactgtttgaaggaaacatagaaaaatatctttacagccttgattcgaggaatcataagcaagttgtaaactctataagccataaaagaaaatattgggaggccgaggcgggcggatcacgaggtcaggagattaagaccatcctggctaacacggtgaaaccccgtctctacaaaaaatacaaaaaatacaaaaaattagccgggcgcggtggcgggcgcctgtagtcccagctactcgggaggctgaggcaggagaatggcgtgaacccaggagggcggaagttgcagtgagccgagataacgccactgcagtccggcctgggcgaaagagagggactccgtctcaaaaaagaaaaaaaaaaaaaaaaaaaaagaaaagaaaatattgagagatttggctacctaatatttaaaacttctgaatgatgaaagacaccaccaagaaacttaaatataatggaaggctggaagaagacattgccaacatatataacaggcattgcattaataatcagagtatataaaggaaagggaggaaaatagaaaaaagtaatcgaagaagcaaataaagcttaacctcactcataacaagtagcatgtaaataacaataacaacaaggtaacattttccatcatcaagctgtcaaaattttaaataataaatatccagtgttggagaatgtaggtgactgataggtttacacttcaggtatctccaatccagaagggttttttttgtttttttgttctgttttgtttttgagacggagtctcactctgtcacccagtgcagtgggtgacactgcaggagtgcagtggcgcaatctcggctcacggcaagctccgcctcccgggttcatgccattctcctgcctcagcctcccgagtagttgggactacaggcgcccgccaccacgcccggctaattttttgtgtttttagtagagacggggtttcaccatgttagccaggatggtctcaatctcctgacctcgtgatccacccgcctcggcctcccaaagtgctgggattacaggcgtgagccgccgcgcccagcgcagaagtattttatgtaaatggcgccccctgcagcccaattcctacctagactaacatgctcaggtgcaccttggaacagcgctggaagaccccttgcccctcctgtgggcttagtaacaatttggggaacagtttttggcctatctggcaaaatgtaaaaggcctttgacgcaatgattcctcttccagcctttcagaaatatgtacatacaggaatatgtactacgtacatgaagatatatgcaaaggaatgtttattaaagcttattttatattggagagaaaaaggaagcaatctacatgtctgtcaataggggactgtttggataaataatgctccttgtatccattcatgggatattttaactcttaaaaggaatgaagtggatttatctgtacccacatagactgatctccaagattattttcttttattttaagatggagtcttgctctgttgcccaggctggagtgcagtggtgcaatcttggctcactgccacttccgcctcctgggttctgattctcctgcctcagcctcctgagtagctgggactacaggcgcccaacaccacgccctgctaattttttgtatttttagcagagacggagtttcaccacgttggccaggttggtctcaaactcctggcctcaggtgatccacccacctcggcctaccaaagtgctgggattacaggcgtgagccactgcacccagccaagatttaatgttatgactgagataaacatgaatgaaagcaaatcttcaaaatatctatgacttgatctcatgtatatacatttgtgtctgaatatacattaggtagatggggaatgcatagacgtggaacaggcagagcctaccaagttgaggggactggacctgaatcattggacggagggaattcgtaacagaaaagactttcatgttttactctgtatacttaattactttatgctctaccgcaacaataatgtattgtatatgtttttgtgtgtgtgtgtgttttcttagtcttaaattcaaaatataaggtagcccactggctctaagctacaagaatccttatgagttgggcagttctttgacaactttttttcccacctggcgaaactatcaaggaatgtcctaccaccaagcgtgagaaatttttggcattcctgaaataaattcttcttctgagccagctcatgtgggcatcataatctccttgaaggcttttaaaagatttagatctgagtctgtctcagattctcgggctcagaaccagaatttctccgtctgaggctactatcttgctctggaggagggagtgagaactggatcactggttagcgtggtaactgttttggacaattgcatagccacagccaggaacacagaaggcagagaggcagccttgatctgcaagagctccaggtaatcccaacggggacccttgatggacaaaggcattctcccaggcttggtgatgaatgtgttccacttacagccagacgagacactcactcagggctctgcagcagagaagttagagctacagcttttttgctttgtgtttttactaaaacttaatttgttgttgcacttgttggatgggcatgtcccataggggaagtttccactactgtgctctaaactttgggctgcttgtaccatcttacttatcccctcattaataatgaattgaataaaatctttagtatatgctaatttcatatctttgcgagagttacgattttaccttttctttttaaaattaccttttcatatttctatcactcccttaccagagcagtgagtttctgggtctccctcttaggggcagacactgttccatgtaattagaattaatttcttgttcgtaggtagacagagaaaagctgccaaactcccaggagacaggggttcagatcctgtgctatggctgagagtgatgccgaggaagacacttccctccgagtcttagtctgcccgcctgtgaaactggctcgtaacaaacccctgaccccaggctcggtcgccttgagcccaagacctcacccaatgccccccgccccgccttccctcccgggctcccaggaggtgcggggactcggggggcggccccttcctcgggaggcgcccaggtggcacgtcggtgcctcagctcccggggtctctgggctccgcgctgcccacggggtgccgaggggcctctggagggggcgggttctctcgagccagaaagtccggagccgcccaggaattttggctcgaactgagtgcatttcctctcgggccggccgggtgcgatccgggaagggcggctgcgggcagacgcggcgctgcgctcggccaggccggcaccatgcggcccctgctctgcgcgctgaccggactggccctgctccgcgccgcgggctctttggccggtgagtggggcgcagggcgcggcaggggacctggagccggggagacccgcagatggcgaggaaggaatgagcgagagagacggagagagagctggacacagcagcgagatggacagagaggcagatgcagggagggagggatggagagaaagattgagaggaaacagactcagaaaaaggcagagaagtagagcaacggagagataaaggagatagggaagaatacacagtgaaaaggaaaaaggagaggctgagacagaaagaggcttcccctgaacagatatgaactaagatagaaagaaaaaggagtttgagagacaaaagagaagaaggaaagagaaaaagtgattaaaatggcaaggggtggagggagagaggatattgaagaaaagagaaagatttgagagagaccaaaaaggagagagagggaagctcgatgcccggagtagagctggcaagagagaaggagccaggatctggagtgggaggtcacagctgctgggtggggcagccccggaggccagctccatctcagagggcctgtggaggctcaggcctggctttataggacattgcataagaagccacactccaaaggatgagtgacccaggctagcccagcacagccttaaggaaccaggcagtcgggcccaggagaaaggccaccgattcacctgccaggtggcctcaggtggatctgcagtcagtgaagaagtcagcctcccggtttccagggagcttctctgggaaactgagctatgttgggtggagatgggggactgggtggaggtggagagctgtgcggaggagagaggctgtctgggtactccattagctgggttccttgcttttcactgtccgctttcttcccctcacctacccctcaggcgggcggatcacaagctcaggagatcaagaccagcctcgctaacatggtgaaatgctgtctctattaaaaatacaaaaaattaatcgggcgtggtggcacatgcctgtagtcccagctactcggcaggctgaggcaggagaatcacttgaacctgggaggcggaggttgcagtgagccgagatcaagccaccgcaatccagcctgggtgacagagcaagactcagtttcaaaaaaaaaaaaaaaagaagaaggaaaggaggaaagtattcatgtattagtgtaatttcacactgatttcatatatttttgtgcataatctttcagattttagatgatatatcttaacttttgattatgaaaacttttggatacaaaaaaatacaaagtaatagtatgtgaaagaatcatgtaatatacttatcaacgctgcttcaagaagtatcagttcatgggcagttttatctcatctatagcctccaccctctctcccctccctggattattttaaaggaaatccaggcattgtatattttctttctttctttctttcttttttttttttttttgagacaggatttcattctgtcacccatgctagaatgcagtggcacaatctcagctcactgcaacctccgtctcccgggttcaactgattctcctgcctcagcctcctgagtagctgggactacaggcacgcaccaccacacctgactaattttggtatttttagtagagatagggtttcaccatgttggccaggctggtctcgaactcctgggctcaagtgatccacctgccttggcctcccaaagtgctgggattacaggtgtgagccacaatgcctggcctggcatcatgtattttcatctataaatatttctttgtgtacctctaagagataagcactcttaataaacataactgcaatgctatgatcatactccaaaaactgtgtgtgattgaatatcattaaatattcaatcactgttcaaatgtccttgattgattgtgtcatatctttttgcaattcatttgtttgatccaaataaggttacatacactgcatttggtcaatatgtctgttagatctctttaaatatgtaagtcttctctcccctttttttacttaattttttgtttttgttgaagaaactaagtttgtcctgtaaagttttccacatttagattttgctaattgcatcccttttatgtcatttaaatacctccaccccttatattttctataaattgagagctatctctagcacgtccaacttccaaccttggtttgtttgtttgtttatttatttatttatttatttgagatggagtctcgctctgtctcccaggctggagtgcagtggtgcgatctccgctcactgcaagctccgcctcccgggttcacaccattctcctgcctcagcctcccaagcagctgggactacggacggctgcaaccatgcccggctaaattttttttgtatttttagtagacatgaggtttcactgtgttagccaggatggtctcgatctcctgaccttgtgatttgcccgcctcggcctcccaaagtgctgggattacaggtgtgagccactgcgcccggccttttttttttttttttttttttgagacagagtcttgttttgtcatccaggctggagtgcagtggtgcgatctcagctcatcacaacctctgcctcctgggttcaagcaattctcgtgcctcagtctcccaagtagctgggattacaggtgtgcaccaccacacccagctaatttttgcattttttagtagagacgggggctgcgggggagtttcaccatgttggctaggctggtctcaaactcctgacatcaagtgatcagcctgccccggcctcccaaagtgctgggattacaggcatgagccaccgcgctgggcccaagtcttggtttcttttagcagcactcagagaaacctttatccctgatggctttttagaccatgagccaccacgcccggcccatattttggagttttttataaaatcacttgaagaatagttttctgctgctttcaaaaatgatcaaaacccgtggatggttttgagtgaatcatacattttaatacaaatattggatgtggtaaatttattattctattatgttgaatgtggtcaaatataattaacccccaagtggccagggttgcttttcaaagcagagtgtgactttgacaattcagaagatacagcggcacctttcagatgccactgagaaaacatttctcaacccccagcatgcagaaatcatctgtgttgtggccctttcttactgtttgggtccagatacaaaaggtctccccataaggcctgtaagtagaagcacccgtacttccgcctcagaggatgggacccaggggccacgtctctttaactggggcagccagcccagccgagccctcctctggggcctccgggctccacagcagcgtgttctcaccagcacaggatgccccacccatggccaccatccagggtgcacatcaggcccctagcaggagccgggccagagaaaacaacgcagcatccaaggaggtccatttcccaactggcagggcctgggagagcgggaggaaaggaaggaagggagccctgaggagccacagccttggctgctcagggttaatcatcataatccttcagtcttttccactccccttgtctgagccactgacagccctgtggtgcatgtgcgtgtctactattttttattcatttatttattttcttacaagacacagtctttcactgtcaccctggctgcagtgcagtggtgcaatcgtagctgactgtagtctcaaactcctgggctcaagcgattctcccgcctcagctttccaaatacctgagactacaagtatataccaccaatcctggctaatttttttttaatttttattttatttatttatttatttatttatttatttatttttgtagagacagagtctcactatgttgcccagagtgacctcaaacttctggcttcaagcgatcctcttgcctcagcctcctaaagctctgggattacaggtgtgaaccaccgagcccagctcgtctagctaattcttgaggcctctctgcagcctccaaaagacagaagaattaaggatgcgctacacgggggagtcagggcctcaggcctaccctaccccattttatgtaagaggcagcagaggctcagggagcagaagaaactttctcacaatcccacaatcattagtggctgaaccaggctgagaaaaggggtctccagcatgttttctaccatgatgcgttcaagtcagcgctgtggtgaggatgctggcagtacaatgtcaggccctgctccaagcttgctctctcagatgcactctgtggaggccccgatgagctcacggacagttgctccagggtgcacaaagcacagttttgtccagatgtgaaggattagtgctgagccatgttgggagcgacctcagcccagccttttccctggaggggttttggagccaagttagacctcatcacagacacgtagagaacagggtggtttaggccagtggaggggagcaggctctggttgttctgacttccaaagcagccagactcccatttggctggcagggtcacactgcatccccctggcctgagccttacacgggagagtggctagggtctgggagagggcaggtgagcctcagagaaaaggcttggccaaaggcctctggacagagccagcaggggggtatgtgtatccacagactcatgacaacaggccctcccctaggacggccactctgtgggtgacaacagaggccccctcagagcttttcctctccaagctgagcagcccagtttcagctgagagaattgagttaaaatttggagtcccagactgggtgcggttgttcactcctataatcccagcactttgggaggccgagacaggcggatcacttaagcccaggggtttgagcttagcctgggcaacgtagtgaaatcctatctctacaaaaaatacaaaacgtagccaggcatggtagtgtgtgcctgtagtcccagctactctggaggctgaggtgggagaattgcttgaacccgggaagaagaggttgcagtgagccatgattgtgccactgcacttcagcctgggtgacagagtgagaccctgtctaaaaaaaaaaaaaaaaaagaggagtcccttcccatagcctcctctagacctgctcctgcctctcaagggccttctcaggatgtggggccaggatggagcatagcccccaggggcctctctctctctgaatattttacatgaatgcctgcagcccacaatggctgctgctttctgctgacaacctcgtcagacagccagcttttgttatggaacatttcaaatcgtgcacacaacagtagacagaatcgctgaatgcacccccatttgctcatcacccagcttcaacaatcagcaactctcagcccatcctgtttgctctaaacatccacgcatgcctctccaccatccccactgaggcctggattatttactttggaagtaaatccaagacagcacagcctttcatctgtaaatatttcagtataggtctttaaaatacttgcattaaaaaaataaccaaagggccattataatgtcctcctccctccccagattcagcaataacaccattatcttttgaagagtattttctaagttcagtggagggaaataatgaaaaggataatttggaaaacagattgttctccacaaaagatgctcagagtggaaggacattttgtctctggtcctgttctcatctctgagtggaagtgctgagagctagatagagttggaatcagaaaatcacagggcagggggtccccaccttgctgagatgagaacaggaggtcagggtgcctgaggtccaggcatttgcagatggtgtgaccttggggaaatcactcagcctctcagagttacacatccatcatcagctctgtcctacctcaagacctgccccacttctagacaactgcagatggccccttggccaacccatccaataccaaggccttacagctacaagcattgcacgtagagagatcaagttccataactccccctattgagctttggatgcccgcatccatggccacagccttaatattgtcactctctgaagctgctcgacctctaaaagttaaattgcaatattccttttttttttttttttttgagacggagtctagctctgtcacccaggctggagtgcagtggcgcgatctccactcactgcaagctctgcctcccgggttcacgccattctcctgcctcagcctccctagtagctgggactacaggtgcccaccgccacgcccggctaatttttttgtatttttagtagagacggggtttcaccgtgttagccaggatggtctcgatctcctgacctcatgatctgcccgcctcggcctcccaaagtgctgggattacaggcgtgagccaccgcgcctggctaaaattgcaacattctttacctcttgttcctcctgtgattcctaagacctccagtctcttcagcccccatttctcccaattcattggccctcttcttggcctcatttccttcctcatcccagctggattccaggcctcctctcctaaacctctggccaaatctcagttccttggccccttgcctccaccacatccatcctgcagactcctaggtttcagctccatccagccatctgtctttgctgccctgcacccagactgtggagcactgctgggggaggactcgtgcttccaggattccttgttgatgccggctcattctgcatagccctcctacactgcatccctcattctgcacatccccttttgaagccctctctttattcaagtcccttacctagtggtgcactgatggactggctctcaaaaaaaagtggggaggggggtcgttgatttccgtggtgtaaatgttctcatcatggccaccattttttttttaacttaaaattttttttctttttagaaatggggtctcactatgttgatcaggctggtcttgaactcctggcctcaagcgaccctcccactcggcctcccaaagtgctaggattacaggcacgagctaccatttccagacaccatggtcactattttaatgtctgtgtttagcaacctactcatagaattcttgtaattttaacatctagctctcctccctacgtgatctccatcttactgcacagagtaaatagaggccatcaggtgggagctcactccactttttggccctctagttagatggtttgcctttgcccatttttgctgcattccctctgtcttccttcgagatgtggtcccaccccctctggatccagggcctcccatcagttcaggaagttcatccttgggttctcctgtcttcctcctgtccctcaggctgtaagcatgattgtgttttccaatgctttaaaaaaaaaaatgacaaccataaatactcctctagaccttgcgatccaatctcccttccttcacagccaagcttcgtgaaattttccagaatccaagtttccacccccaacctcaccttccctcctcatctcatggtaatccaaactctgcttttccaccactcctaaaagtgctggggtgaaatttagcagggcctttctgtgctctctttccagtccttatcttgctagacctctccgctgctttcggccctgctgacgcttttcatcctctgcagaatctgtaaagctcttggcttctcttgacttctggggcagcaccctccttcctgagtgtcagcgttctccaaggttccagccaaccctgatgccccacaggcatctcagggttaccaactctgaaacccaagctcggcatcagggctctgagacttctgctctgagggttgatggtgcctggaagagctaactcaaggagaacaatggtgaatcaagagttgagaggggtttcaccatgttagccaggatggtctcaatctcctgacctcgtgcgcctacctcgccctcccaaagtgctgggattacaggtgtgagccaccatgcctggctaaaattgcaatattctttacctcttgttcctcctgtgattcctaagacctccagcctcttcagcccccatttctcccaatttattggccctcttcttggcctcatgagtcctctgcttatgagtagtgactttggacacatcctttcacccttctgtgcatcagttttcctacgtgtagattgggcataacaacaggttgttggagaggttaagttagcaccctacatggtgcatggtaagcactcatcacatgccagctgttactaacgggttcccagtgtcaacgctgctactgaaatatctcctttcattttcttcctcactattcctacagctcctgcctctgctcatcacttctccttcacccctcttatcctgattgctgcagtaacctcctgccttcaaaggcatctccctccaatctattccctatatttaaaaaattcatgtttggctctgtgacttttctgttaaaataaccccccttggcctggcttggtggcttacacctgtaatcccagcactttggaaggctgaggcgggtggatcacctgaggtcaggagtttgagaccaggctgaccaacatggtgaaaccctgtctctgctaaaaatacaaaaattagcagggcgtggtggcaggtgcttgtaatcccagctactcaggaggctgaggcaggagaatcgcttgaacccaggaggcggaggttggagtgagctgagatcgcaccattgcactccagcctgggcgacagagcgagactccatctcaaaacaaacaaacaaacacacaaaaaaacaaacaagcatcagaactggtttattaaagcccctgggttaaagctctgcccccttggcttcatttccaggacttccctctccagtctctctctcccgcccaccctgtatctccagccaccgcgggctccctgcaggttttgcacagtgagccctgctctttcagacctctccattgttgcaggtgccattctgcctggctgaagcccatcctcccttcctccctgggcttcacctccttgaggaagttcatctgggtctgtaggtgactgtggctgtagagactggtgggattgagatggctgacactcgcacactgacccccacctgggccgtcctccgcttgctcctgagtttgctttgaggactgacctcatttgagcccagtgtttacaggagtctctggcattatggaaaactaagggtcccacagtgacaagacttgttttcccacagctgccgaacccttcagccctccgcgaggagactcagctcagagcacagcgtgtgacagacacatggctgtgcaacgccgtctagatgtcatggaggaggtaacagggtggtttggaaggacatgcgagttcaggaccaccttctaggatggtgtttttatgggcagatgcaagcttgctttggaatgtgaggacatccgggccgatcctgccctgtggccacctcgtccaacatcaccctcccatctaggctgccgggctgcccagcccccagtggaccctgcctcccctaaggccttgcttacccccacccggatatttcaacatcattactggatgggaaggtggaaattcagtcactgttttgttatatagccacgattcctaacttgtgtggggaaaagtttacatctttattgtcacaagcctttaactgaaattgagcattctcattcatcataaatacaaacagcgagccgtggtattaacagtactataactttgtcatcaatagaaatccagataatttcatcttctagttatgaatatctcaacatataatttttatccttccttatgtcaaaatttcagttgttattaggcctgatgttaaatcatgtgatttagtgagttaataaatacattttattttttttgaggcagggtctctgtctgtctaccaggctggagtgccgtggtgcagtctcggctcactgcaacttccacctcccaggctcaagcaatcctcccacctcagtctcccaagtagctgagactacagacacatgtgccaccatgcctagctaatttctgtatttattttgtagaggcaaggttttgctatgttgcccaggctggtctcgaactcctgagctcaagccatctgcccacctcggcctcccaaggtgctgggattacaggcatgagccactgtgcccggccaatacatatattacatcaaaaatttaaatttttttttgacagagtcttgccctgtcacccaggctggagcccatggtacaatcttggctcactgcaacctctgcctcccaggttccagtgattctcatgcctcaacctcccgagtagctgggactacaggcatgcaccaccatgcccagctaattttttgtacttaccatgcccggctaattttttgtacctctggtagagatggggtttcaccatgttggccaggctagtctcaaactcctgacctcaagtgatctcgcctcaacctcccaaagtgctgggattacaggcgtgagccaccatgctgggccaaaaagtttaattttaaatacttgaattttttttttttttttttttttttttgaggcagagtctcactctgtcacccaggctggagtgcaatggtgtgatctcggctcactgcaacctccacctcccggttcaagtgattctcttgcctcagcctcccgagtagctgagactacagacgcgcaccaccatgcccggcttctttttgtatttttagtagagacagggtttcgccacgttggctaggctgatcttgaactcctgacctccgatgatctgccccccttggcctcccaaagtgctgggattacaggcgtgagccaccacgcccggcctaatacttgaataatattttaatgcaattggtgcccttagtaattctatatgttttattttttgcatttaaggcattattctgagaagaggtctgtaggcttcaccacactgccaatggggtccatggcatacacagggaaaaaccattaagaactcagtaaatttcagaatcccaaacctgtcatttggcagagataccaccagggggcggaacaacaaaaggaatgtgagctccaggctgcaaagtccaaaagggagaaggtattctacaggcgcttcatccaaatctgtgactaagtgccaaaaaagaaggagccttagagagcaagccccctaggatattgtcatctggggaaactgaggcaggtaggggcagagcctgagtgaggaaaacccaggtcacttagcgcccagtcctttcccactgcaccgcactggaccgccagctgctctcttaggacctagctgatgaagcggaacgtggaaccacttctgtcctcgactttaccccacttcccactctagatggtagagaagaccgtggatcacctggggacagaggtgaaaggcctgctgggcctgctggaggagctggcctggaacctgcccccgggacccttcagccccgctcccgaccttctcggaggtgagcagtgcaggtggcagaggacagcctctgggcggctgtcatctggcgctgggcaggcgagacagggacggctgctccactgcacaggtgtagcctggctggcagggagggccccagcgctccctggggacggaagcgggacggcatcatccctgctccccgcccgccccgccccacctgccacacccggtggctgccgcccagtgtcaaatgaggttctggaagagccggccctagatgccatctcagcacaacccctgcgcggagaaactgcctccttcattagccttctcacgactggagcttctcagctcctttaattttcccctgagcagccactcctgttccaccccaaaactctcgcagggaagacgggcgtccccactgatcaggcagggttggggttgcactctgctctctccttgatccttgtgtcccgcgcgcagtagttcctgggggccggggagggaagggaaggaactgctgggcaccacgggggcaggtactctgcggcaccccagcttgctcactgggggcctctgctttctttcagatggcttctgagccctggagctggagcccagcagttggaggtggtgcacctgccaggcagcgcccacagaaccagccctgtcctctcgacttccttccttagcttcatgtgaaataaaagctattctggtctcctctgtgtctgctgacagagtaacccgtttaactacagcctcctctcactccacttccatgcctggaggaagcctgcaaccccctccaggctcagacctggggacacccccactcctgtcatttataggggcagatggagcaggggttgattcacacagatgggggccctttgagtggccttgcttctcaaaatgtggccataggtgaaaagcaaggggatcagggtctcaggacccacccagactgtttaatccaaatctgcattgcaatgagacccccagggattttatgtgtccattaaagtggtttgttgttgtttttaaaaatttttcctatgaagtgaaattcaatgtaaaattcatcattttaaccattttaaattgtacaaggctgggggcggtggcttacacctataatcctagccctttgggaggccaaggtaggaggatcacttgagcccagaagtttgagaccagcctgggcaacatggtgaaaccccatccctacaaaaaaatacaaaaattagccgggcatagtggcacgtgcctgtagtcccagctactcaggaggctgaggtgggaggatcacctgagccctggaggtcaaggctgtggtgagccatgatcatgccactgcactccagcctgggagacagtgagaccttgtctcaaaaaaaaaaaaaagaaaaagaaaaaaaattgtacaaatgcagtggcttccagtacattcagaagttgtgcagtcatcaccaccagttccagaacattgttctctctctagaaagaaactgtgtatctattaagcagtcacatcccattcccgctccccacaccccactggaaaccactgatctctgtcttcacgaacttgcctattctggacattttaaatacagtagtccggctttatctgtggtttcaccttccatggtttcagttacctgcagtcaaccacagtcctaaaatattaaactccagaaataaacaatatatgagttttcaattgcacatcattctaagtggcgtgatgaaatctcttgccatcccacttcatcccgccccggatgtgaatgctccctttgtccagcatggtccacgccgtctacacttcctgcctgttagtcacttagcagccttctcagttaccagatcaatggccacagtatcacagtgcttgtgttccagcaacacttctttctcttaatcaagacccaaagtgcaagagcagtgctgctggcatatggttgttgtttttcacacaactctcccttcacagaagctggcatattgttctaattgttctattttattcttagctatcgttgctaatttcttatggtgcctaatttataaattaaacttcataggtatgcatgcataggaaaaaacatagtataataggattagatactattgtggtttcaggcatctgctaggggtattgaaatttatcccctgaaggtaagggggtagtactgtaggtagaatcacacaatacgtagtctagctgtatctggcttctttctctgagcataatgttttcaagggccatctgtattgtagcatgtatcggtacttaattccttcttacggatgaataatgtttcattgtatgaatataccacattttattcttttatttttttagacagagtctcgctctgtcacccatgctgtagtgcagtggcatgatctcagctcactgcaacctctgcctcccgggttcaggcaattctcctgcctcagcttcctgggtagctggaattacaggtgcacaccaccacgcctggctaatttttgtattttcagtagagacagggtttcaccatgttggtcaggctggtcttgaacttctgacttcttgatccacccgcctcagcctcccaaagtgctgggattacaggtgtgagccaccacacctggcccacattttattcatttattcgacaattgagggacatttgggttgtttgcattttttagctatcatgaataatgttgctatgaacatccgtatgagtttttgtgtgaatatttgttttttaatttgttttgggtctatatgtaggaatgaaattgctgagtcacatggtaactcttacgtttaactttttgaagaaccaccaaactcttttgtattgcagctgtactattttacattcccacctgcaatattagctgtggcttattcatagatgccctctagcaggttgagacattttccttctagtcttagttgagtgtttttttaatcatgaaaggatgttgggttttttcaaatgctttttctgcatcaattgagatgatcatgtgattttcccctttcattttattaattacatgcattacatcgatttttttttttttttttttaagacagagtctcactctgttgctcaggctggagtgcagtggcacgatctcagctcactgcaacctctgcctcccaggtttaagcaattctcctgccttagcctcccgagtagctgggattacaggcacccaccaccatacccggctaatttttgtatttttagtagagacagggtttcgccatgttggccaggctggtcttgaacttctgacctcaggtgatccacccgccttggcctcccaaagtgctgggattacaggcatgagtgagccactgtgcttggcctgattttcatatattaaatgacctttgcagtcctgggataaatttcacttggtcatggtgtataatgcttttaatatgctgctggatttagtctgccagcatgttgttcaggattttcgttcctgggccacaattctagacacaccctgggctggaagggaacccactgccttgaaggaaaggacccagtcttggctgcattcattgcctgttaactgaagagcccttggtccctgaataaccagcagagatacctgggtactatgctgagggccttgggtgagactcggtcttgtcggtttcaggttcagattcagccagcacattcccagctgtggtggttacaaggcaagattcctgctagagaaaagtggagggaaaagtaaagtgggctttgtcttacaccttagataccagctcaaccacaggacagtaaagcaccaaatggttcttgggaatgccaattccaggacttgtctcttagatggcatttatggacctaccctgggccagaggggcgcccactgccctggaggggggggtcccatgccaggcagcattcaccaccagctggttgaagactccctgggccttaagagaacatcagcagtagtctggcagtactccctgtgggcctgtggtggcggtggccatggagtgaggcacctctgccttgggaaagcggaagcaagagagggaaggactgcatcttgtggattcagtgccagctcacctgcagtataacagaacaccaggtagacttctaagattttttaccctagttgctggctcccagatggcacctttgggcccagctggggcctggaggaccttgctgttctgaagggaaggacacaagcctggctggctctgccaccagccgattgtagagccccagggccttgagcagacacaggcagtagccagggagtggtaactgcaggccttgggtgagagccagtgctgtgctggctttcaggtctgacccagtgcagtcctagtggtggtggccacaggggtgcttgtgtcctttcacccccagcttcaggtggcttagaacagagaaagggactccctttgtttgggagacagtaacggaatgaacaagagtctctgtatggtaatacagagaatcctgaatcttgtccaagaccatcaaggcagtaactctatgaggctaaaaaaaaaccaaagtgttattgggcttggggtgaatccttaagcagatacagcttagagcacaacacccaagccattcaaatatctggaaagccttcccaagaaggataggtacaaacaagcacagactgtgaagactatgataaatacctaactcttcaatgctcagacacagatgaacatctacaagtatcaagaccacccaagattttcctttcagcacactgaatatgtcatctcattgccttctcacttccatgatgttggatgagaaattggctattaatcttatcgaagatttcttgtacgtgtccagtggctctttctgctttcaggatttgctttgcttttggacagtatgattataatgtgtttcaatgtcacactgagtgtctctttgagttgaccctacttacaattcattgagctttttgtatgtgtagattaatgtctttcattatgttttcagccattgtttctttaaaaatttcttctacattcactcttctcttgattcttattaggtgtatgttggtacacttgatggtgtcctgcaggtgtcttaggctcagttagcttttttgttgttgttgttttctttctgcacctcagaatgggtaatctcaattgacctatcttgaagtttgctgatttttgtcttcttcctttttaagtctgctctggaacccttccaatgaattttttatttgtgtacttctcaattccagaacttctatttggttcctttttataattccagtctctttaccaatattggtgagacatcattctcctggtttcctttagttctttgacctttctgaaaataattgacttaaagtcttgtctgttaagtccaatgtctgagctttcctcagtttctattaacagattttttttctatgtatgagccatactttgtttcttcgcatacctcatagtttttgttgaaaactgaacattctgaatattatttataatgtggcaagtttggaaataaaattattcctccactgtgtcacctaggctggagtgcaatggcaggattatggctcactacagcctggacctcccagggtcaggtgatcctcccacctcagcctcctgggcagctgggactataagtgtgtgccaccaggccctgcaaatttttagtattttttgcagagatggggttttgccatgttgcccaggctggtctcaaagtcctgggttcaagtgatccacctgcctcagcctcccaaagtgctgggattaccgatgtgagccactgtgcccagcctgttattttcttgaactacatttttagttttttagtttgtattctttgtcaggtgtggccactaagtctttggttagcttagtggtcagctagtgattcaaaagatttctttgaacacttggaacaacaaaatgcctcgtagcatttgcagatgtgttctgtgttgggacacacctttcaaccttcacccatgcagtttataactatgccttagccttcacttcctgcttgcacggagcctgaaggtcaggcagaggtgacagcatagggccctctcaagtctttttaagcacatgcccagccctaggcatgtgtatggtctttcagattcccaggaatatgtggaatctctttaaagtccttattctcacccaaagaatcttatttcctagcctttcctcctgaagcttttcaatttgtctcctgtttgctccaaatgttattccttcccctaggcatgagccactaatacactgaccttgaaacgtctttccaggctgccatcttcactttaggagagctccaaattaggcaaaataaaagaaaggcatttgaaccagtccttcagggagcaacaaatcaaatcaaaatcaacatacttcttgaaaataaggtctaatctgctacctccagtgacaggaacctatacagggaatgagggatattgtttttgatgctgctgccatgctggggagtgggggatggggccagggtaagctaaaacacaacaaagctctcttactaaatccagcttttattcttaggtattcacctgattgctgtaaactttcaattcgtttccagagttcccataaatttgagtttttgccaccttatttgctgcttttgtggaaggacagacttgtggaatttcctattccatttcgttgaccacattaaagttttagaagctctcctctagtctacccttcattttaaaaagtcaaaaagacaggaagtgacatatccagggtcacacaacaaatcaggggctgagctgagatcagaataaggatgtttgactctcaggtcagagctctttctgcttcaggacttcatcagctcttagtgttgagaaggagtcaggctcaagctaaacaccaatattaggccaaggggcagctttccaaggagtaggggctgagggtaagagtccttggtatacctggtgggcttgactgactcctttactgacaggggaccctacatgagtccaggttgtggactgagtaatgatgtccctatcccttagaaaaacacaggcagagagctttcagatttgatgggggtgaaaatgtaaacctttatctttctgaggacatgtatttagcttgatgtttctaggtctcattccactccatctcggccagggcaggaaagagcctacagcagaaataaggagccaggtcctaaggtagggctgtaactccctgccaaggccaacagaaaatgggcatggcatggcattaaaccaccactttgaccgtgggcacctgcaaaggttcatctttcagctccctcttcccaaagctaggagtgcctcatctcatctctcatcacctgactgaattccaagcagactgtgccatctgctcacctgccctctggaggaacacctctacttttgcggtgttctctgtgtgagcacagtagtatttagataagcgttagattacagcaggttacagatgcagtttcccagtccccacacctgctcaaaatgcatgagggtctgaccgcaggaactgctctttagcaagctcccctgatgatcctgatacacactcaggcttgaaaaccaccactttaggaccatctacccagccacagggtgagcactccaaggtttctttcttaaattttgcacctgagacaaatgccaccaggactagggtgaggcgagtgaggctatctgtctcaggtgcaaaactatttaatagtgtttcctccagcgcccccacagctgctgaaaattctctcagggctgaattcatctggtgcttctattttagaagtcagactagatgtgtagcatggactggccttgactaacatatccaggaggcaggagaagacccattgtgttctatcccagaaagatgacctgtaaggttgcacatctttctccctatcttttttgtcctaagcataataaacagtgttgatcccaacctcccactgaccttggaaggcagtaggtgcctttgcctctgggaagatcatgaggcattcatgcagtcctccagcccatacttaacatgggttggatctcttgggagtgaccatgagggcagcgagaggaacaggaaggcagggagaaacaggactaggacaaacacaggtgtcaggtccacaactatgccaaatgtcatgcccagggtcaggttccagcccatgctgaggttcgaggggactgggtggatgggcgatagctgaaagaaaacctggcgggccataggcaggtaaaatgtagttttattcagcagctatctcatcagcagctctcacactgtccacctttacctaggctgtcttctccagatctgcagctcctctcagcagccagctctgtggctcctgccacccccatgcttgcaggtgcactccctggctacagggtcagcggcttaactctccctctgggcacaagctgagccatgtcctggctcccctctatctatctgccagatggtcactctcccttacaggggtcaatagcttcactctctctgggtgctagtgcacaccacgtggagccatgcccatccgagcccaagaacatctgtacagcgtcagcagggcagttataccttttccaaacaatagtggctttgagccaagtatgaacttacacaagcaggttatataacaagtggagtatacgcctgtgacctaaactcgctgagtcactctggcctggatatccaccttggtctattccttgaccaaagcacatccatgtactttacaacaggtggtctccaagtgtgtagaccagggtctcaaacccaaaggcctgcaggagccaaatgggtgacatgggcttagtgtaatacaagacggagcctatagcaaataaggagtacaggcctaaaggggcagctgcaactcagctccagccatgcaggaatgcaagccccatagtgccagaatttctgagttttcaagagaagccagaattccagatttttaaaaatatgaaatctctcaatgtttaaatgttggcaacaaattcaaatgtctaaaaacactttggaaaccaaagtaaatgtgtctgtaggtgcaatattgcctgctgggcaccaggctgggaactttggagtaaacagggcaaggtaatgtcacagaatatggtcacatcagagcacattggttctaggccccatcacaattcaggaggcccccagggtcaccttgagttcatggcaagttgtatatgccaagcaccccatcccatcaggcaggtcccacctggcacccaagggcaaggggcctgccctagcagaggagttcttgggagagcagcagggatggggcttcagcttgggcttgaggcatggactctgacgcagagctgacgtgttgaccaggacctgccatcaatctcaggtagaccaggctagttctcagctcatggctgctccacacccttcggatgtcattcttcctttatgtttagggggtagtcctcaagcaaatgtctgcagatgagctactccctggggctcctgccaggacccagcaggcttgatctagcctagtctctctggattctcccatttctttttgtttttttctcatttgagacaaggtctcgctctgttgtccaggctggagtgcagtggtgtaatcacagcttactacggcctcaatttcttgggctctaaggatcttcctgcctcagcctccagagtagccgactatagggaatgcactacaatgccaggtaaatttttttttttttttgagacagagtctcactctgtccacccaggttgaagtgcaatggtgtgatctcagctcactacaacctctgcctcctgggttcaagtgattctcctgcctcagcatcctgtgtagctgggattacaggaatgtgccaccatgcctggctaatttttgtatttttagtagagatggggtttcaccatgttggccaggctgggtctcgaactcctgacctcaggtgatctgcccgcctcacctcccaaagtgctgggattacagccgtgagccaccacgcctggccaaattttttagtagagacaggggtctcgctgttggctaggctagtcttgaactcctgagctcaagtgatcctctcacctcagcttcccaaagtccttggattacaggcgtgagccatagtgcctagtcgattctctcttttctaaacctcaacgcaggaggttggaaaaggagtgggtggagacccctgatgcaaggtaagctctagcttctggacatgacaccataattctcagaaactctcttatggattctcttccctcacaccaccaaccaacgggcacagggtccccagagaccagagccaggagcccctttcagcctggaggcaccctgaggggaggcactggtcttgtgactctctgggttgtccccatccttctctctggcccccgccgaggggcaccaggaattagcacacacccttcttccctcctgggacctgggtgaaggactgcattcttcgcaccacaccttcagtggacttcactgcacctgcaaccaaccaagatccctttgcctttcaggtgtctgggcctcctgcctggatttcgggaacctcccttcccatgtccttacgagtccctgcaaactagtgtatgctcagggtttcctgcacacaaatctctacgtaaggttacatgaactttcactggctgataaggccagacctctgagccacagggcagaatcaagcagaagaaaacaagttggtaccaggaagacatttccagaccattccagagctggctgactcttaatgtggaaacaagttttggctacagacattcaggtttaaggcacataccacaaattacaagaagccctgtcactgacagggaactggctttgttctcgtggtttctgcaaggaagatggaaggaatgactttctggccctttttttttgttttttctaaaaaggagtgagtttggcagtaacaaagctcgtgacacactcaccagatgcacaggctaccttctcaggcacgcctccctttctctcctcagcgaggacacggtgcttcacccacccagtcgccctcaccagaaatgtgtatgcagcaaacagacttgtatgcctctgtctggcaatgactgtaagaaaagaaaatatgcctccaaataaaaatatacaattacatgacgaaatgaagccaagtcttagccacaggcaaaggggaatgattgcatgagtcagaaaaatgaaacatctattttagcagcaagaggctgtgagggatggggtagaaaaggcatcctgagagagttctagaccgacccaggtcctgtggcacactatacgggtcaggaggggtggaagacaggcctaagctctaggacggtgaatctcggggctatttgtggatttgttagaaacagacattcttttggccttttcctggcactggtgttgccggcaggtgggcagaagtgagccaccagtcactgttcagtcattgccaccacagatcttcagcagaatcttccggtaatcccctgaagtatctccctggccacagaaacaaggaagacatccgttaagggagggacagtcactttcagccttctgggtcctgatattcagccctgagcacccttatagggagaaagccccaccctggggaattttctcccactgcaggtcctgcagcaggcgtcacagaccttaaaaaatgcagttcagccttctccaggcccccatcagaagacggaaagcagcactcaccccagctatccacatcaaatgaatacccacaaaaaaaaattataatcatcctaaaaaccacttcccagggctaaccaatattgctgttttcccagtgcatttatgctgccttaaattggggttaccaatgtaacgcaacacagtgtcctgctcaggaaatgcaatctcctcacacatgactgtccagtggaaggctcagactgcccaggtcccagggatctctcctctgtctgaggccactacacttactctaagagtgcaggctcggcttggctcatttctaatcatttccttccaccctaagcaacttgagggcaaggcatgtggcttcttccagatgtccatagcttgctggcatgcaggagatactctgtaatgaattattaactctctttttttttttgagacgaagtctcactctgtcaccaagactgaagtggaatggcgtgatcccagctcactgcaacctctgtctcccgggttcaagcaattctcctgccgcagcctacctaattagctgggattacaggcaagcccagctaattttgtatttttagtagagacagggttttaccttgttggccaggctggtctcgaactcctgacctcaaatgatccacctgcctcagcctcccaaagtgctgggattacaggcgtgagccactgtgcccagcctagaatcactaattctctaacaacagcttcattcatacagccaaggaaacacagtgagtttcctgtgatgacatgcccaccatcatcaaatgctactgagtctaaggtgggaggacgtggtccccatggtgcaattgcaaggctcatgtgagttcagaatttgagcgttagaccacacagctgagaatgtattttgtcagactggctctgccacacagcgatacaactgtggctagtgtttaatagacacttgacctgcactgcctcactcaatactcacaacattcccaggaaggaacgattattttctcatcttaaagacaatggagctggggttcagggagatttaagggagccattcaaggtcacacagttagcaagtagaaaagctggactccaagtggcgtgacccccagggccctcgctctgaacggccttactatgtggcctacgccataaagctgagtgcaggaagtgctttgtcagggagtgacagcagagctccacagagcctttgggacatgagttctcactgacagatcaaggaatcacacggtgatcggaacgctgaaggtcacggtcaaggttggggaggtcccgagtgttctctgatgctgctgggggatgcaaggtgggggcgacagcaaggtcatgatccacctgccctcagaaatttataatctgtttaagggcaaggggatgaacaagtccgaggtccataatcaagatgcccacacacagcacagaggccaagcatatggccactccaaggagggaggttccacaggtgactgagatgccaaaagggagcccagttggcctgcagcaggcccgtaccgagatgtcgtggtacagcgacttgccgtacatccgcttatactctgatctgatgtccaggaggtcggtctcgctgcgagacaccatgatgcgaatcagggtccggtcctttgttcctgccccctaaagagagtccacccaagagcatgagcaccaggcctcctcaccttcccacctgccctgggccctccagtcccctccctacccaggtcctcggaactctcagctgagatttagctctccccaggccttctgccctcagcccttggtcccaggcacaggcgaggctaaggttccatcgcaacctgcacatggaagttacataccctcatggccttgttgagcctctccgcaaagaaggctggggtattcttgagacatttcactagaagagagaaactcggcataaccagatctgcagaaaattctcagcccaagcagggcatggagtctacaagtgtcctcttagaggcccagatgtcaaacccatcactgcatccatcttttctcctcctccttctgttccaggctcaactatcccatgatcttggctccagctatttggaacagaaacacgcaaagcctggaaaccaacccaccctctttcctggcaaccactgcggtgaaaggaccaagagtcagaggggcgggggtcttagtggggctaggagctacacagggaagcaatgtggatggtgatgaggaactgtgctgctgctcaggcaggaggggcagactggagaggccatgaccgtcatggagaaaccgtggctgagtggaatgtgcatctccctaggcttcccaggccatgagacctactatgggggacaggcagggaaatgaggattttccatctctcccatccagaaagctccaaaaaaagcataatgaaaaaaggggcagactgattttcccaagtgagtagaaagaggggttgtgagggcctcagggcagggacccaactctgcacagtgggagggccctgctagaggacatgggcaatgtaagaggcacaccaccatcctggagccaagccagctttcctcagcatgggcctgtttcgctgctgcaagtaaaaatctttccacgtgtttccatcacaaacatctgacaactgcctgcagggatgtatttttagaggaaacgtggcaggatatgagtcatactcctccgggagcgcagttggatgccctcccactaatacccacactgcagttccctactccagagctgcaccgcaaacacacacaagacacctccaggacagctaggggttcaactgcacagggaaccgggaagcagcatgacttcccagcatctggacactctgggctgagcgatcttggatcctgtggtcccttcacggtgtcacccatcagctggaggacaggcgagcagcctgaacactcacgatacacgttagcccctggcaggtgggcggcaaacctgagacacttacccacggccagcatgccctcctccaggtccccggacatctcccggcagatgctcttctcaatgtcccggcctgtcattctctggtactcattgaaaactatggggatgacagaggcttatattatgaactgaaatgtgtctccccaaagttcatatgtggaagtcccaactcccaggacttcagaatataaccgtgtttggagataagatctttaaagaggtaattaagttaaaacatgctgctagggtgtaccctaatccaattcgcctggtctccttagaagaagagaagattaggacacacacagagatcccagggatgtgcacatgcagaggaaagaccatgtgagcacagtgattgtcacgaagaggccacgggagaaaccggcaccccactcttggatatctggccttcaaaactgtaacaaaatgagtatctgctgcttaagccacccagtctgtggtattttgtcatggcagcatgagcagactaacagaggactcacatgaggtggcctctgccccaaaatctcccacctgccactctgctcccacaccctgcacgtccccaggcctgctagcgctcaaggaagtcagagtcttcgtcacaagttacatgcaccacctgatgtccctccctgtgtggtccctttctcaggactgccaatctgcttaaccaaatcgcaccttaatacccctccagggcccactcccatgtactccaagacagtgtcccctcttctcaaatcctccacacctccagtctctgccattccttggctttattcatgcatccatctgtcttcctcagcctgcctgtgagctgaggcccagcctgccccagccagcctggcttcttgctgctcacctcgacctaggacacgctaagcacccacaggagtggatggctggctcctagagagacaggtggcatgatggagaccttggtcctgactccagttctgacccaggacataaaactctccttccccagcctgagtctcagctaccatttgcattttaaagttgtgatttctgctctgtgtgtatctgtctcaattaatatcttcttccaatcagctactcttttctcctaagtaataatgtttgtgaagccatgggcttgatgcactacttacatgttctgtactcattaaaagaaataatgattaagatgaaaatgctttcactcaggctccattacaggatagtgcagaggttaaaaagtgtgctctggggtcgggtggtctgggttcaaatcccagctcagctgttactagctgtgcacccctacttcctctaccaccctgtgcctgctttcacagctgcgaatggggagagccacagcgcctgtctctgtgtgcagcacagagcggtcgctgggttttcaccctcactgcccactggagcagccctggccacagcccaccagttgctccgtgtggtcaccatcctcagtccttgcctgccacctcacactggcctccaggacccccttcctctgcgtcctcctccctccctagctgctccttcttagtctcctcacaccggtgggctccccacagtctccctcctgaggggacctcctgcagtcccagagcctcagataacttcaactacccatagctcccttaccttccacaaccaggccagacctctcctgacctccacactcagcaacccagcagcctccctgcagctccaccctacaggcacctaaagccagctccacctacagtccccctgtctcagttgagggccattctcccactgcttggcctaaagaaaccctgtataatcctcgaaccctctctctcccacacgtcacgtgtccaattcatcagcaaacatggccggaacctgacacctcctcaccacaagcccctattaccaccattcctccccgggtccctgcagcagcctcccgacaggcttcgctgcttggccttgcacccttcactccattctcggcaccacagccagggattctgcacagcctcctctgctcagggccctccactggcttcctcttttgctcaggataaatacccagctccgggaagtcatcagcagggccctctcccctctctgccctcacctcccactcctcttgctcactccacctgctccacatggtcccccttcactgttctcagtcgtgctgggagccccaggcaggcctctgcccctgcatctccctttaggtttttaaatcaaatgtcacgacctcagtggggactggcccaagcacctcccggtggaccctaccatcactccctacctgtttccagcttgattttcctctacaggatttcccatctgatacagattttatttcattgttgtttactgtctgtctccccaaatgagaaagtgcagcccatggaacacactctgcagtgccctgccccccaccgtggccccacacctgctccaccacctgacagactgacccatgcgggagcgcgatttacatctgttgaatgaatgagtaaatgaatggcacccagttttattgttatgactgtttcttatgccaggctttggaaaacactggattgggtgctcccgaaggaccctcccaactctgacgttccacattcccacgtacaaagacaccaggtttctacaccggtagaacctccagaactggatgtttgccagaactcaggaaaccctctgacagtgtcttttaaattcccaccagggggctcttttgaggaggcgaaagccccacgcagggaggaacgaccaagtgttcccatagctttgtttccccacaatcccctgactgccctcatctaactggcctctgagggaccccagcctgccttacctgctaccaggtgggcccggctccgggagcacagaaccgcattgaacttggactcgtctgttcccaggcggttctccccggccgcatacagctcctggagagagaggaagacgcacatgtggcacaggccacacccagaccccaggcccaggtcacccaggagagcctggtaaacttctgaaggtttgagcctaaagtatttgccaatttgcaacctctgaactagatggcctctaaagtgcctgctaggcctcaggtagcagccctgaaaaagagcagaaagcagcaatcaggggctgagatcccacaggtcaagatgaggccaaagcagctctggactgagaaggcagagcatgagacaatttttgccccgctaaaagtggcatgcaaaactctcgctggagcaaaagccagagccctgagccccaggcgtgtccagccctgactcccagaatgggaatggatgttaccagccagagagacactgaataaggcagaccctgcaggagcagcaggtctgagaccagggcagaggcaagtgctgactgggcacagaagaccgagccaggagtataggcccttgtccgggctctgcttctagctttcagttgggaacagtgctcaacctttttgagcctcagtttcctcctccggaaaaggaggaccagcaaaaggaccagaccagaggagtagctctcctccagccctaacaagggggcattccttgaggtctcattccaatcccgcagatggtagagataatttagaccactggcagctcctggtgaatgccctgccgtggatgacaagagcagtgaagggagacagagaggtatggccaactccaccccaccaggaagtaatggctctgccctgccataatactacggttgaaattcattagtgggaaacccaaacttttcgagagagtagctcagatgcctggactttgcttggacttttccccttttgtctgcaactcacaagagggacaacgacagaattctaagggtgctcaactaatgtggcagctggtttctaggctcaaatcctcaaaaacttaataagcaagtgcaaattttgcccctttgcaaacataatgctatgtgcaactaaacatggggaaagtacgctgtcacacaaaatcccacgtccaaaaccatgatctatcaactatcgaaatactaattatctcacatgttccctcctataggtggggaagctgaagccctggaggtcagattacctgttctaggtcatacagttgaacagttcagcgcgtctgaaactcacagcatctgcaacccactgcttatctattgttctttccaccctagggtacctctctcaggaagcaagaaagcggggtgcatccctgctttaggaagtccaggggcttggccatcacactcacctgggcatctctctgggcgagtgacatgtccacgtttgtgctttcatcacggtttccctgaaaggaagcaggtgtatggtcatgcccactccttccccatttattttccctttcctcattgcggggatcccatctctttgacttccatggcttgggggccccgagccctgtcgtgggaaaagtacctgagagagagagatgaggagccgctggaagtgccctgatgtgtcgcttcgaatggcctcttccagggtctttttgaattctgaaagggagaagcaaggaaggtccatcctgtagctctctttatggagctgcccattgcaaaacactatcaaaagtgggtactggggagaaaaaggctggaggtcttggctcgggctcaagagaacaaatagcccatatggccctccagggatatacaagcctgtgacctccaggctgacctggcctctagtcagccttggcccaaaccacatccaggttttccctgcctctcccttacattagtcatttgcaccatgtataaacagaaggaagggctgggtcttgggtcaaagcccaaagtattgggggtggcagaagatgggttgataagaaggccaggaaggagtaaaaggccctaggagagaatgaggccacagccccaagagcacagggatctgcagagggcagagggcagagggcagagggagcggcctcacctgctttgtaggctctgtttaattctcggatgtgctcattgctgcgggaagcgaggatctcaatcaggcaggcttcatcagtgccaaccccctgcaggggcagagaatacaaccaaccatgtgcttgttccagcagcctcaccagcactcgggaagaagggtgggggctacgctgctgccttaatcccagcaacagaggcccctgacacagagacacaccctccagccactcccaggctcgagggcatcagctcttctccacagcccgggcaagcacaatgacagtggcagtggtgatgagtagggctcacacaaaggggcatccccatggatcagaaaactgagcatcagagaggggtactggctggtccgaggccacacagtaaatggttgggttaaaatgtggaccgaggcctgctttattcagagttcagccggaagcgagatgacaacaactgaaaaaaatgggtaaaaagcaagagagatccaagtggacatacgaaaccctggtcctagaggggatggtggaatgtctgaaaacaactaggaaaaggtaggaacaacaaggatgaatcggacaaccacgccagggacagtaagaccatagaggacaggctgggcagcctggcttgtatgttggtttgaatcctggctctgcagcttaccagctgtgtgacctcgggcacattacttaacctctctgtgcttccagttccttgtctgtaagatgggagtgatactaggacctacctcacaggaaagtcatgaggattaagtgagttaatgtacgtagagcacttagggcctgtcaggcaggacgtgcgacattgtgtcagctgtttcctgctacagctactattgggttactacacgttagcccctcacccagtattcccagcatgtcctgagacagcatccactgtccccatttcacaggtgctcaaggacacacagctggtgagtgacagctgccccaaacctgtgtggtttctaacactccacaaccaccagctcatgactccggctgaagacgggggccagggagatgtctgggtccactccctggggccccgggccatcgccctgcctgatggcctcctgaccccctccctagaataacacatgtagatgtgtttcagcggagacccctctcctttccaggccaccacactgaagtctctgcttctcctgaaggagggaacattcactgtgcttatcaggcctctgagtgacaggctccttctgggctccagcctgactcatgggattccctttccaagggagctgcctgcccctgcctgcagggtgcacacagagctgtgggactgcacagaatggacaggacccaaccctcagtcaaaacccgcaggactggagggaacagtgagtccaagccgggcccgtcagaacctgcccgtttggagaccctgctggtctcttctggagctgggtctcatagttatgcggagagtggtcgacaggccccctctcccaccccacatgaagcagccatggtaggagaagcacagaaactgacagaaaagcgggcgctcaggagagacagagaccagagagacgtctggcctgggccctctttacccacatgactgattctccacttttgttgttcttaaaccgaagtgtgtttctgtcatttgctagtaacagagtcctaaagaatgagaacgataccaaccatggcctcctacccctcttcttaccacagaatcgcaaccttcaaacccgagctcccccttttctttaagatggagagagacttaagcctccctgatgatgactggtgcgtcatttgcctcttggggaaatcacagggagttcccttttctatagcatgtggactccaacccaggaaggcctgggagccatactgacaacagcagctaatgagtgggctagaacacagcacgccatccaggcctccttctgggctgtgtgtccacacgcatgcgcgcgtgcgcacacacgcgcgcacacacacacacacacacacacacacacacacgtacacaccttgatggcttcctttatctcataaatgtcaaagaggactggggtcttcatcagagccaagattgtcttctcaaagtttcctgacagttcagatttcagatctttgatcaaatcctgattggatattcaaacaaacaaccaacaaaaaaaaaaacaagtctatttaaaaaatccacaggaagtgactaataagagccatatcccagatttgaggaacagcagcatggacatcccccaggggcctgagagaaaagcctgctctcagccctgccccaaacctcccaaatcagagaccacattttaccaagatgcccaggggatcggtgacacaatgaagtttgagaagcactgggctagaacacgaatctaatcaatatttaccgaatttttatctttctaagattcaaaaccccagaagttcaaaatatgctcatacacgcccctcgtacttgggcagcactcacagcctttccctgcaaagctcttacatcagctaaaccccccagggtggtcatgaagagggcaggggaaggaaaatgatgtggccacaacctcagtgagatgtggcagagcaagggctagaacccagggatagatgtctggagcctctcagcaaacctcagcacccggtggcatccttcacctcccaacgatgccaccagctggatgggcagaaggaaatgccctcctgctccttactgtccatccgggagatccgggcccacccaaggaaaagcaggggagagcagggctgtgctgagcccaggacacgcctcactgtcccgcgcccccaccccgcagctcgccttgccgtaagccgtcttgaaggaaagtaggatctgctgccgctgcttgttggagcgactccccaggcagtcaatgatggcctgctcatccgtccctggaggaagaggcagcaggggtgggtcgggtaggggtcatgagatgctctgcagctgagacttccctggcctgggcccctcaactgttctgggcatgctagccatacccccacatccaccttctatcaccactggggccaggtcagcgtcccccagctaccccagcccacagagccacagtgaaactgcctgggaaatagggggcagggagtaggatttgagccacccagggtctcttaccgaagcctttcatggccttccgcaggacctcggcatctcgcagggggtcaaagccgggagcatcagtgatggtgcctcggcttccaaactactcggacaaacagtctcaggtaagatgtcgtgcatgccgccttccccacattcaaggctgctccacccctagactctgggaacagccctttctctaagagttggagtatctaaaggagtccacagtcaacaatgcagaggactttacgccgcgtctacctaacttgactgttatctggccttgtgttctagtactgaagctttttcctggctccagtggctgggagctcacctatagctgagtcctgatgctgaaaatctgcccagtgcccaggtcctccagggctggggctcaggctcctgatgaagggcaggtctcgggagcaggggctgtggcctctctcatcgatgcctggcctccacagcacatgtgagcacacatgggtactcctaacagggctggctagcccatgtgtcccctccagtggatgcaggtattgagcctccacaactgtgcatggcagcctgatgacctcttgatctagcactggttccctcgcactgttctctagactagcatctgccggacttcctccagaccctgatagctgcacaaacccgcaaactggaactttccaggctaaactgtctcccagtggattgtcttcctaggggctggtacaaactggttataacacaattaagagggcagctcagggaaaagataagggagggaggctggaggatggcacagggtgggggaacgtgtgggtatggaagggaaggaggaaaggagaccctctgtctaaaaatagtcattgagcacataccactacccctgtgctggctggttgggccacagaaccatgacaacgaattctaggctctgcaaacacgaactgttctccaaaatgagccaagatcaaccctggaggaactgccaacattctccctacccaaagggaattttaataatcctccaaaacctgtctgtgccggggggggcgggggtggtgcatatcaagggaccgaagacagctgttgagcacaaagccttgagacaggtggcctgggcagttcttacaaaacacacagcccaggcagtaaatgacacagaggaataaggagtactcgccaggggtgttctgacccaactcggatgtggagcgtctcatcacaccaggagaaacaggacagctcccttgggccttaagcaacacaacccagaggtggggagtctgcaagaaggtgacgctctttgtttgtctttttttgtttttgtttttgttttaaaaactgggtcttactctgtcacctaggctggagtgagtgcagcggcatgatcccggctcactgcaacctctgtctcctgggctgaggtgatcctcccacctcagcctcccgagtagctgggcctacaggtatgcaccaccatgcccagctaattttttttctatttttagtagagatagggtttcaccatttcgcccaggttggtcttgaactcctgggctcaagcgatctgcccacctcagcttcccaaagtgctgggattacaggcatgagtcactgcacccggccgacactatttgttaaaacaagaagtgcagctggaggcctgcgcctttccctgtctccccatctactgagccatgtgtctccagcctttggggcccaggcctggaccaagggaggcagtgggctgacactcacctgggttgggggcacagcgggggtgacagtcccagaccccgggtatcctgggtagctcggcactggctgctgctgcccagggagtggcactggaggctgaccagggtaggtcactggtggctgcccagggtaggcccctgggggctgctgtccggggggtggcatgggctggcccggcacaggggcccctgggtatggcggatatgagggcatcctggagggtgggtttcctcctgggggtggatacatcccatagggaggaacaggctgctgggcagaggggggctgcccaaagccgccagggggcactggtgggtagccagccccaggggccccagggtacaggttgggcatgttggctcctccaaatgtcccagacatgttggccgcctgcaaggacacaaagcagagcctgaggccaatgggccctgctgcactccgtccctccaccctttttcatacctaagccaagtcagtcctcacagcatctccgcttgtggaatatgaagtaccgttatacccatttcacagaccacagaatgagtttacttgctcaaagttacacagccagtgaacagtgcgactcgatccaaaccagagatcctcatccccttctgcaggggagatgccttccctctccacatggttgctcctcccatcccagaccacctgggtgaaggttaagagctcactgcccaagaaggtgcgtgggtcccatatgcagggttgggggcatccccatcacatcagcctgctacccacagacacctctggcaggcatgttcaggtgaatctgcactcaccaggaataaaaacctaaatccttaggatggatagcctcctacaccctgcaagagctagacccccagacttcatttcccatctcaccccctcgcctttccactttagccacactggcctctcctccctgtccctgagcacctcacaccccttggcacctcagggcaccggcattccctagacatccatacagcacttccttcccctgatgcaggtctttgctcacacatcctcttttcagccagacccaccttactgctaacttaaaatcattatccttacatcaccccacccccactcctgacccctttaccctggtcaacttgttcctatggcacctacactttcaataacatcacatcgttgacttaaggtactgcctgtcttttccccatagatgataagtgcagcacggctgagatttttgtttgttttattcacatatccccagtgcctagaactgggcctggcacaaattagggtgtgtattggttgcataatttcctctaagcatacgtttgttttcaaatcataaactaagcatacgtttgttttcaaatcataaaatgtattattttaaaagtgaaacaacaaatttaaaaagtagcatgtctgcccaagatacctgccacacacccaccaaggcctaaccagaagagccctccatatgtacacacatgcacatgcaggtatatgaatgtggatactcatacatagcacgtgcatgcacactcatgcagataccctcgccaccttcccaaccctaacccctcagggctgaaagggacctgtgagatcatctggtccccttcccctcattttacagatgggaaaagtgagacccagagaggggcagagagcaggtggcagaagcctgatgaaaaccctgttctaaggtacagctcaacacactacacaccacagcaacacacacatagacaactctggagccccagaggccagcagctttgattcctctggccacgcaggtgtggccccagggctgcctcagcaggagagctggactcaccattcccgagagatagtcctggttgaactgccccgcataggtggccacgttatccagcccgatggggggcatgctgggcggaggagggtaggcagcacctccccagggaccaccacctgaaagcaacaccaagccctttagccccctgccagtcccccaccacacggggaaaggcagagatgagagctcccaggtggtcagaaagggaggcccagtaaagcctcgagcctcgagcctcgggacaccacagaccacatgaaaacaccaggaggaaagtctccccctatcccactggcagaggaggggaaaccttcccctcttcccagggaggaaggtggagttccccaaacactcccaagaccctctgtggggtattaaggaggctgggagagcccaggcaggctctgccctcccaagttcaccatcatggagcaggaggacagacaaggacagactgttgtgggacaccatgctgagcccatgacagaggtgaccatagggagctctgagatttcagtaatgcgaaggcactggcgggagggggtttggctgtttgctattacaagtctgtaaaaggcagggagaagcaggataagaggctggagggacatggggctgggtcatggtaaacacagataccagtccacaagaggacaggaagaaacagaggtgaaaagcccgctctgaaaccagcaggaccggtatgtgccctggggcaaggctttcaccctccttaggcttgtttcctcagcttacaaatgggctaatggtgagtgtatgcctagactgctgtgacgaagactgagttaacacctgcagggctcagctgggtgcccgatgggcattcgacatcatcatggggcctctggcctgttagatgctttcctctacatggcagcttcggatcggctcttcatctccagggctccagaccctccaggaagaaccttccctaaatttcctgcctcctcctctcttgctgctcagaggctgctcagctgtgctagcaaaggtggcagtggcaggatctggatggcaggatttctactatagagagagaacccaggccagtgccagccaacctggggtgggctcattcagagggcagtggcccagctcagcccctaacatgccctgggacagcagctgagccacctctaggtctgagtctgttcttcacctgctgaatgggagggaaggtaaatggcctgcaggtctggggtgttcaaaccacaggacctcagctccaaagaaatcaatgatgcctaggagtcccctggggagaggggcagcggctcaggcaccctcaggatgaccagccttggaatgacccttttctccccttggtctcatgagccctcatatttcctttcccacagtggggaccaaatctcatttgaggaccaaaaggggccagggccagagaagacgacttctccatgtgactacccacagctcctgcagaaaacagggagtgacctttgacccttagcatctgcctccacttcctctcttggcaagggggatcttgttgctgcaaacccacacaccttgagcagagggtaggagaggtggtaaggggcaaccatcacctagcaatgctttggaggacaccgtgtcgctctgcctgcctatctcatcagtatccaggaccacctaatgagggagaaatccttgaagcaattttgcggagaagaaaactgagtctcaaagtgacagcatttgcccactgttactagagagtaaggcaagagacccagccctgggcctggtccagggctttctggaggcagtttcaaacctaggcctccgatggccttagtgtcatgctcttctccagcccctgcctcggctggctgtcccactactcctgttgtcctctcctcccctgctgggccgtgctgtgaggggaggaggggagtgaggaaactactgttctcccctctccactcccagccactgtacagaggcagcattcactctcctccccaccccagaccctcttacctggtgcagctggtgggtagccacctgggggcgggggatagccagggtagctcatggttagatctggaagagaagacgaaagcacattcaggctctgcctgagagcccctgctggcccgtgggacccagcttcttgaaagggcagccaccaccacaactgggaccctgcagaagaaactgctgcatctgccctgcttgtcgcagaccagttcactgtctcctgctggtgcctccagctagaaacagtacccaccagcatgctgcctgacttctgggccagggccacacccccggccccacccacagtgacaggattcactccccatgagccagtttccttgaaaggccctctcactgaagctttgctcctgcctctgctggcaagggtgcagtgcgcctctgggcctgttctcccacctcagaggtagagacgcactgcctcattctcaggactccaggtctgtctatttatcttcctgtgtccttattgccatccctccagcaacaggggaagtcagaggcccctgtctctcttcattctccaacctctggttcatcaggcaaggggacctggtaaggtatggaatcatcgttcctagaagcaaaaagggccctcaggaggttcatctgatgcagggtgaagaaccagggcaaatgaggcagcatcaccctgtttctgcagtagaggctgctgattaagagaagtaagtgatttgcagatctgtcagtaagggaggaagagcagcctggacaggtgccaggtgagacacctgctctcacgaagtccctctgaacacggatcccttggcaatgtcccctgccagttaaattgtgaggagggacacagatctgctgtgacaccagccacattgtgcaacctgcctgctcttgctaatagcagctgctgctgcagtctgcagagacacccaatggcaggcggacatgtgaggaaacctgcagggtccctcaacaatcacacctgctcgtctcgagtatgtggcttctttttacacactgggtttcacgctgcaatgcatatcagaatcacctgatgggattgttaaaacacattgctgggctccaccaccaagagtttctgagacagtggaaccagtttttgcatttggaacaagtttccagatgatgttactggtccagggaactcactttgaagaccactgttctagccacgctatccaactataagagtctagctgcccttcatatctatcttgaagaactgggcatattgggttttgtttgtttgagacagggtctcgctctgtcacccagactggagtgcactggcacaatcatggctcactgcagcctggacctcctgggctcaggtaatcctcccgcctcagcctcctaaagacatgtgccaccacacacagctaatttttttttttgagagtcttactatgttgccgaggctggtatatgctgttctttttaagtttttttattatttatttttatttttttgagacagggtctcactctgtaacccaggctggagtgcaatggtgtgatctcggctcactgcaacctctgcctcctgggttcaagtgattctcctgcctcagcctcccaagtagctaggattacaggcgcccgccatcatgtctggctaatttttgtatttttagcagagacagggtttcaccatgttggccaggctggtctcgaactcctgacctcaggtgatctgcctgcctcggcttcccaaagtgttaagattacaggcatgagccaccatgcctggcctacttttattttttaaacagcgtctcactctatcacccaggctggagtgcagtggtgcgagctcagctcactgtaacctccgcctcctgggatcaagggattcttgtgcctcagcctccaacaggagggcgcaaccatccctggctaatttttgtatttttagtagagatggagtttcgccatgttggccaggctggtctgaactcctggcctcaagtgatctgcccgctgcggcctcccacagtgctgggattacaggcatgagccactgtgcccagcctacatgctgtttttaaggaagctaaagaacttccttaaggtaccaccggtccccatagggtgggcctggttttcagccctacgggtgtagtcatttgtttgggtcagtgggtccagaggtgaccgtaggcaaagccctatggctttggagaaagctggaattggctccctgtagtgtggaccaaggacctactccttgcagttttcggtctctctgagcccctaagcacgtggtggatgaggtccccggtggcatcaccttcagagagggtgtccctgaggctgggtgggctgtcagtacaaagccctccccgtcccggccccagcctgacccttctgcccagactctgccaaaccctcagacttcactggtgaggaggtaatctgggggatgtaaatgaccagtaggccaggaaccttctaatagaaggaactgcccgacaggtgagcaggaagagccgggatggtgtctctgtcaccttcctctctggagacaccactaggcaggacctttgagcaccaaagacactctccactcctggcctcctctcagagaaatgaagccaaaagctccatccacagccaggccagggaaaaaacccaagaaacagaagctggataccaccctgttccttataccaagtaaattccagccaggccaaataatgcagtgaaagaagtagccccaaaaaccaacgacataaataaaatttcagcataagagacaaattaaaaaaaaataaagatgagaaaaaaacttaggaaaaaagttttattaatataataagaaaaagatcaataaccactagagaaactgtcaaatgatgtgaacagatctggcagttacagaaaaggagctgaagatgctcaccttcaccaatgtgctgaggaaatcaccaattaaaaatacacagatgtcggctgggcgcagtggctcatgcctgtaatcccagcactttgggaggccgaggtgggcagatcacctgaggtcaggagttcgagaccagcctggccatggtgaaacactgtctctactaaaaatacaaaaattagccaggcgtggtggtgggtgcctgtaataccagctactcgggaggctgaggcaggagaatggctggaacctgggaggcggaagttgcagtgagccaagattatgccactgcactccagcctgggtgacagagcgagactccgtctccaaaataaataaataaataaaatacaaagatatcaaaacttaaaatgacatacctttgactcagcaactccacttctgtaagtctcttccccagacacacacctgtgtgaaatgtcatacagacatgaattttactacagccttatctgcaacaactcctaaacctccaccaatgaggctggttaaataaaccacaacagatccaacaatggatactctgtagctatttctggatttagccagctctgtatatggaaagatgcaatgaccaccattattaatcaaggtgcagtactgtgtatgtactaagctaataaaaaacccagaaacatacaaactaagtggttcctgagtgtagacgtgcacggacatccttggaatgacacacaagaaactagctaacactagctgcctctcgagaggaaaggtggggctagaaaatgaggcttccggtttagatctgttccctgtgcatttctgctgcatgtatgtattggccattaaacaacttttaaaaaggcccaattcaggtgcagatttctgagctcacttgaggctagccgtctggcccccaaagtcctggctggtcttccaagactaaaagaacacacacagggtccattcagttccaggcagccttggtaaccctggagggcctgcaggccagccttgatggcgctcgtggagctcattcttggggtggcttttaagggagttcccagcaggagtcaaaatctgcctcctggctaggagctctgccctgcatggccccacagggcaggtcgaccccactgtgagctgtggtcctgcgaccctgggtcttcccctctccccaagatatacctctagtcctccgttcttagaaagaatagcctcatttttccctctgtcattctctgcctgaaatagtttcaagcctgctccccacttttttttttttttttgagacggagtctcactgtgtcacccaggctgcagtgcagtggcgcaatctcagctcactgcaacctccacctcctcggtgcaagcaattctcctgccctagcctcccaagtagctgggactacaggcacctgaggcacctgccaccacaccaggctgatttttgtatttttagtagagacagagtttcactatgttggccaggctggtctcgaactcccaacctcagatgatccgcccgcctcagcctcccaaagttctgggattacatgcctggcctgaccccactcttatcttttagttcttttcaggaccaaacgccccaggtatggtctgaagagtgcagggcgggaccttcatctccctccagtggatgctactccctacctccccggactggtacaagtgggttttcaggccacggagaccttatgtgggctcctgtgaaatttctcccctgggttctgcccattgctccagtctcctgagaccttctgggattctgctcaacatcaaacatcttccccctctctctcagctttgttttacatccatggatgcaataagcatggcatttgtgttctgccaagtaaccaagacgaaagggacaacgagggacactacagaactgtcatactcagaactccccagttcaacatcaaacactaggcatcatgtgggtgcaggcatttaaccagctctcccccaactcactctgccaccacccagtacacatttctccacatgcccaagtgagggttctagcacatttactctgaagagagcctgtttatctgcctaattacccccaggagaaaagtaaacgcagcccaatagccaggggtgaccttcaggtggacacaggctcccagcgctgaccaatctccccccaagctatccatgttctaggaggctagaggctgcaggattagcacactgctctctgactcacagaagcagcattcttctcctccttttctttgaaaattaagaaatctgctcatggtccagtcttctggtaactgtgacctctgcattttttcaaaagaggctaccgcaaggggctgtccttggagaagtcgttcctggcaccccagggctgccatatctgggctcggcaagacttctaaggccctcgggtccccctccctagcctgtccagcacccactccccaggagagaggcaacacagtgagctataatccagaagatctgctctctctctctctctctctctctggcatccatgagaatcatacctttcaccctgaccaatgcctctctcctcctttccttgcatggggcaagagacatgcttcacactgctggtgcaattctgatggctggggcatgtcccccgctctacgcctgcttctaatcacggccctctgacatggggactcactggagagggcctcctgcacacagcaggcagctggcctccttaaggatgggtccaattcttagaaacctgtctctggggaccttctggcctctggtcctgcctctcagggcaggctgcagcacaaataccgcccttccttcctcactgcgaccatccacctgcagctgtgcacctgatttcatccagctggggccctctccagttaaatcggtgcttctggaaaacagtcccctatagggcttgttaaaacacagattgctgggccccacctccagagtctttgaatcagtgtctctggggcagggcccaaaaagttgcatttccagtggctcccaggtgatgctgatgctgcctgcctgcaggccacactgcttcatcatgcatgataatcacctggagagctcactaaacatgctagcgccctagcccccatattctgggccttctaacctgggataggcccaggaatctgaagtgtaaacaagcatacataccccccagtccccagtaattctgatgtaactggttctgtggtccacactctaggaaacactctttcccttaaggtattggacactctctagctcatctgatctcactctttgacatggtttggatttgtgtccctgcccaaattgtaatttctaattacaatacaatcgaattgtaattcccagcattggaggtggggccaggtgggagctgactggatcatgggggcagatttccccctttggtgctgttctcatgatagggttctggtgagatctggttgtttaaaagcgtgtagcgcctcctccccacacctctcttcctcctgctccagccaggttaagatctgcctgccacatgattgtaagtttcctgaggcctccccaagcagatgccagcatcatgctttccctcacttggagagctggctaaaaatgctggtaccttggctcccatattctgggcccttcaacctggcataggcccagcctgcagaactgtgagccaattaaacctcttttctttataaattacccagtttcagatatttctttatagtcgtgtgagaatggacgaatatactcttcttcacaatagtaagctctagggacacagactagacctaggcacccccacagttgtatgacagatgcacctgacagcaatcacttaagcatacccagaacgaccctatagtctaagaagaatgtgtgttcagagttctgagctgaggaactgtggccaacctggagatccattccttatctataaggaacatcagaacccctaagccattccatggccatacaggagatcaaggccctttgttctgcgttaaatgaaggttgccaggtggaggtggttaggaaggaggatgctaaattaaaatgctatacaaactgcatgctttttacaaatagtagtggtccttccatccagcctgctgccactggaccgccccatatgtaagtcccctcaataagccctatgccttgttcgttggctctgggtctcttcttcggcctctcaaacatggtgccatccctattaaagttgacaggagtctggcatgacagcactgcatcagaagccagcctcaaagcgtctggtgaatgccaaaagcatagagcagctatctgggggtgcttctcagtggctgcaaaatggcctgttccctaaagccatgttacgtgtacgtaagtgtaccattcaactccacaggctctaaaagggtactagctggagtcccctaacacaggaatctagaaatgctacactgggacaggaggcaactgccagagcaagaagagcctcactgccccgactcagtcatccccctaccaaaagggaagccttgctgtgtctctacccaacaattggaggtggagatatgggctccagccaccagcaaggctaggccatgcacatttgctggtgtcctgcctgacttcagggatacagaagggaaaggaggggtggatggtgtcagtgccatgcctgggactctggactgtcctccccagaaagacaacacagggctcatttgggaacagagcctacaccaggttaatgctgagaggcaagggcctagaaacatcatctcgggccagaagccacacagcagtgacaccccctgcccctcagggcctaacagcaaaccaagcagaccgggactacagtggatgctttcatggagtgattttccactggccttccccagtctggtggctggaatattgatttgtatattagttttttttttttttaacattagatccttaacctgtttttacacacacacacacaatttattttttaaaatactttccccataaggttgtatccataaaatttaaatatatcattgctattgtttaaatgtatcccccaaagttcatgtgctgcaaacttaatggtcaatacaacagttctgagaggcggtacttttaagaggctctaccctcacgaatggattaatgtgttatggaggaagtgggctccttaccaccagtgtgtttgttacaaaagtataacatgctctctcttacccgcatgatgtcttctgccatgttatgaagcagcaagaaggcccttgccagatgcagcctcacgatcttctcagcctccagaactgtgagccaaataagctactattgcttataaattactcagtctgtgatattttgttagagcagcacaaaattaactaagacaatagtttaaaccaggcaggtccaataatccctgctgatatattctttaaaatgacaagatgaggccaggcacagtggcccatgcctataatcccagcactttgggaggctgacgcaggcagatcatttgagctcagaagtttgacaccagcctgggcaacataatgagaccctgtcgttacaaaaataaaatacaaaaaaattagccgagcaccatggcatgcgactgtggtcccagctactctactcaggaggctgaggcaggagaatcatttgagcctgggaggtggaggttgcagtgagcccagatcacgccattgcactccagcctgggcgatggaagtgaaaccctgtctcaaaaaaataaaaaataaataaataaaataaaatgaaaggaaggaaaaacaagccatagaatgggagaaaataaatgcaaaagacatatctgataaagggactattatccaaaatatacaaagaactcttaaatctcaacaagaaaaccttacgatttaaaaaataggcaaaagacctgaacagacacttcaccaaagaggatataaggtggcaaataagcatatgaaaagacgctcaacatgtcattaataaattgcaaatgaaaacaataagatactactatacacctattagaatggccaaaatccaaaacactgataacaccaaatgctggtgaggatacagagcaacgggaactttcattcatcgctggtggggatgtaaagcggtataggcactttggaagacagtttggtggtttcttacaaaactaaacatagttttaccaatgatccagcaatcatgctcttggtatttacccaaataagttgaaaacttctgccgcacacaaaacctgctcatggacattcacagtagtgttattcataatggccaacaatttggaagcacccaaggttacacactgtataattctaactctacgatattctggagaaagcaactatggtgacagcaaaaagatgagtagttgccagaggtcaggggaggaaagaatgaataggtggatcgatgttgcttccctgattgtaacaatataccactgtggtgggagtgctaatggcggggggtgcaagtgtgggggcagggggacagggaaactctgtggtttccacttaattttgctgtaaatctataaccactctaaaaaataaattttatttaacaaataaaaggaatacaagcacactgtagggaaattcaaacagaatagaaacacacaaaatgaaaagcaagcattcttccctctatccttgtacacaaaggtcaccaccaagcagttttcaacgtacagtttaaaacacacagaaatgtataatacatgtatatatatttacataaatatataaatgtatatgcatatgtgtttatacatgctcagatatatgtacattttgttttggctttaagttctgggatacatgtgcagaacatgcaggtttgttacatagttatacatgtgccatggtggtttgctgcacctatcaacctgttacctaggttttgaaccccgcatgcattaggtatttgtcctaatgctctccctcccttggcctcccattccccatatatgtacataatttttttaaaagaggaaagaaactgacgcatctgcaaactctcttcactccgggagaaggctcggctctggttaagtaatgtctcaggtgataatgtgatataagaaatatatatctggcagtcttgtgggactgagccctttaacctatagggtctgcagtgactccagttagggtcagaattgagctgcattataggacacccagttagagtcagagaattggtcagtgtggggaaaaaaaacacacatctggtcgcagggtgaagtgttgagagttttgcttggagttttccttcttagttcacattccgacctggtgcccctcctggcatgggctggggaaatgaagacttacttagccctgagctgatgtgagtggctcacgacctccacacagtgccctgtgagtggctaggcactcgtcccaggtcactgggcaggagagagggaggcaccaggctagagcaaggtgcagacaagggcctggagcccagaactcaagatggaaggtctaagacgaggcagaaacgtctactacggtagtcctgttccaaggatctcagccagaaaaggatctcagccagcaacctgaggccaggcctcctctcccagacctcacttgacccatgggcaaaaccaggggcaaccctttttgaggtccttccttcctctgggatctcaggatttctgaagggggcctctttcagctttcaccccaaatcctagacttacagactcacaaaatgtccacattggaagggatcatgttctaacttcctcagctttgcagctaaaatacaccagggacatggcttgctcacatcacacgggtgtggcggagagggtccatggtagagcttggcctgcaggcagctgacgacaaaacctgacatcccctcacagtgctgcattgcaaaacgtgtgccacttctgtccaagctgagctggcttcactggtggtcccagtgggccctgcccttggcaacctacttgaagacccctcctccaagggcaaaaggagacagtgcaataagcatgctttaaacaagggtctgccaaggccactcctcacagccagaaggttccagaaaccctcagtgcatcagctcacagttcccccataactatgaagacgagggaaggcagatagagcccaagctctgccccacacaccccttcagtggcaggagctggccccaggggaccatgtacctaactgtggctgtggaattccatggagtgagccacaatcctaattaatccattaatcacagaggcggtgattaataatggtcgacttttttcacaaagttttgttatggagcacatatataaaacagaacagtttaataaaccatcatccctcagcttcaacaattatcacctcaaggcccatcttgattcatcccgaaccccacccacacccctgtattgttttgaagcaaatcccagacatcatatattatttcatctgtaactgttcatatctctaaatgttaggaactttaaatataaatacatacagatgctccttgacttatgatagggttacatccaaataaagccatcatgagttgaaaatgcatttaatgctggcaacacagcagtccccaacttatgatggttcgacttatgatttttcaactttatgatggtgcaagagtgacatgcactcaataaaaaccgtagcctcattgtaaccccatcaaaagtggaggagctggttacatcccttctgaaagtgatgtaaccccatcataaagttgaaaaactgtaagttcaaccatcttgagtcagggaccgtgtgtgtgtgtgagagagagacagagagtgtgtttatataactaatacgagagagagagacagacagacagacagtgtgtttatataactataatacagctgggactctaagttgagatcaggcttctacatcagcaaaagactcaggtgctgattcaccttaggaagagtatgagcttggaatgcttgagggggcacttgtcaatacaagagggccagaaaaccaacctccccaggactcttccaggaccactgagctctacctagtggtgatgctgccaaccatctgcaaatgttttccagagtcaaaaatgcagtcccacagccttgtttaccactgttaccccagcatctggctgaatgtgcacctcataaatgcagcttgagtggaagaatggatggagttctggggactggcctctgctttgccagttagtcaattttctcctttataacctcttccttcattggctcctgagattatttaagtatcaaataggatgtatttggcctgcagggcaaggaacagcataataaacacttataaatccaaggatctcagcaaggacatcacactcccacaatatgcattttggccttctgtagagcagaacccacctggtgcatgacagtcaactgatggacagcttgttcattttcactataagtctgtttgcttctgaacacctaccatctactgcccccagaagtcttgctcagatctaaccgggatgcccaggcctagctcagcctcacttagaagcagatagagtgatgggcagctcagtgctgcccggaatgtgttccctgacaccagcttcatatcttacaagttgtgaagttagaaggcacgcagtttaaggagcgagacaggcagacaagagcaagagattagttgcccgaaaagtttagaaaatgcttactacatatagttatgtactataactacacatcccctttccaggaaactgccaatttgcaacagcgtaataaaagctctgataaatcctgtaacaaaagtgcctgcttaactctatcctcaaatttcccaaactaattaggccataatagtagttaccatttattaaatgcttactatgtgccaggcactgttaagtgcttcacacggaactgaactttataacaaccctatgaggcaaatactaaaattatccttctcatatcagaaatgaagactgagggacagagaggctgtgtaacttgctcaaggttatagctattgaatggctgagccaggcagtctgcttccaaagcccagactttaccactacactatacttcctcacagagcccactggccccagggactagtattttaagaacagagctttagaaacactggtatgatgaaatagcatggaattcagaatcaggatacctggcttctaagtccggtttcactgtatgaaacttcattacatacttcattaaaggtacttcattaaagtacttcattaaaggcaatggaggatggtgagaagaacacagactctgaagccagactacccaggttcacatcctagtcctgctccccaccagcaacgcgatcttgacagtttacgagacctttctgcacctcagttttccccatctgtaaaatggggatattaacagtttaataccaagtttgttcccattatatcatgtaacatatcatgacatcctgtttctccaaaacaaaataagaaagagaggaccctgggctatttgataatgcccaggatgagaactgtggggactgaagggggaaggaggggggtaggagagaaacacggaactggggagggtcagggcagtgtgacaggtggaggatgggagtggggagcacactggcatggctgtgttggattttccagcctcccaatagagaaagcaccaacaggaaattggcgctgttttctttccatcccctccacgtgcctgggtgtatgggggcctgctccactccaagagtagaggggacagcgaaggcaagactgatggtggagggaggccaccgggcagggagatatgaaagaccctcggagagtaaacctgcctgggagagggacccgcagaggcagggcctcagcctgcatgaagctccaaccctgcgggcaccagagcctgtcctcagaattttcactgaggtgtggcatggatggggccatcttctctcctcctgcctgcctctccagaccaggtgctgagaagggggatgggggcaagtgaggaggaactcactttccatacaacgcagaccgagagcacacagcgtcacacgcagatctctccgtcacgctcctccatggcaggcttccctggaagccaggccactcctctttgtgggcagagtcacctctgaggcctgcccacaccaaacaggctcacataagagccaatgctcagtcaaatgctgagtccaattcagaatttctgaggagtggaaagtgggcagcagaggaagaaagtgacagagacacagtgctaatatctggctgcctcgcaggccagcacgtgatgggcactcaggtcctggaggacgctgaggttcttgcaacagacacagtggcagtgacagaaaaagccccccacccaagtcctgactccaaagtgtggccaggacctgctatagtttgaatacttctgtctccccaaaattcatttattgaaatcccaactcccagtgtgatgacatttggaggcggggcctctggaaggttatgaggttggagtcctcatgaatgggattcatggccttataaaagagatcccagagggcccaaccctttccaccatgtggggacacagggagaaggtgctatcctatttgtgaaccagaaagtgggccctcaccagacactgagtctgctggcaccttcatcttcaacttccagcctccagaactgtgagcaatgtacttctgttgtttataagccacccggtctatgatattttattacagcagcttgaacggatttagacggaacctaaggatgcacgcgcatgtgcgcgcgtgcacacacacacacacacacacacactctctctctctctcacacactcccaaaaagggaaacagtgggttgtgtttataagtgcaggtggcaggggcggggaggagacacaggtctctgtctttgtttacccacttccgcaaggggaagccaccgccagttacaccacctgagcagagggagcttctgccagggcccgcctaggagggaccagcaaaacaatggtagtgagctgatgtcaattgggcacaagtcccagggtggctgaggcttccctgtcaatcccacccctcttagctgtcaggtcactccagttactgcaaagtccaacccagcttctcccagatctcctgggcccacagggatgtgccacaccccaagtcctgtggtagttactatctacaagacaacccttgcagcagctctgccggaaggaagcagaaacttctctaaacccttccctcattttgcagtgggaggtaaagggaagctctgcagctccaagacactgggcctgagcctcactgacattggctttcacaatgtctacccctagattcttggcaggcttctaccacccccaattactctctctcacacactctaaaccagctcccccatcttttcacggcccacactcccccgtcaagggccccaaacatcacaggacagtcacaagggacttctcaattctgctgcatgagttttaccgcagcccacacagctctgatatcatcttctaacactgctgctaggccactgggatggtacacagggtttggagtccagtgacaatgattccattctagctctacctcttgttagctgtgtgaccctggatatatagattgaccactctgagcctttctcctcacctgtgaaaagaggaaaaatgcatccatctcattacacagctgtgagaatgtagtattctcacatatatatatatatatatatatatatatatagcactacaacaggtattagcacacagcaggtgctcagttaattttaacttagtccctaggaggcattagcctggagccaaggtctggttcctaacgcaactgcttgctgtgtgacccccctgggcaacttaacctctccgaacctccattctatctgcaaagacctgatgtaccccacctaccttggattactatgaggactaaaagtaaaaagaacaggaacgcgctttgtaaagcaggacacagttatcttcactctgtgaccaacacgcctagtggccaaagaagccaggctctgacatttcgagagggagaaaagggtcacagatcctgggcacacactaaactcaggtgtcaggctcccgccaggggaccagcccagcccacacagtgaggggagtgtccagccaacccttagggtcccggggcctcaggaaaatgctggtaaggggaggggtagagggagggcttttcagagcctgaaactcagctaccatcagcttctctgattaggtccctcaaagacatccccggtacctgtgaatgcgttactttaggtggcaaaagggactgtcctgaggtgattagggttacccgccatgaaatggggagactagcctagattatccgggtgggcccaatccagtgagaagcgtccttcaaagcagagagcctttgttgctgggttaaggatgaaaaggaagaataagaaggacagagtccaagcatgagagggattccacccatggaggaaaagggccaagtgccacggaactcaaatggcctctaaagctggaaagggcaaggaagcattcacctctagggccaccagacaaagacacaaccctgccaacaccttcattttagcaccatgagatccaaaagaccctgagataaaactgtaaagataaaaaaaccatgtggtaaaatagtgcagccactatggaaaacagtatggagattcctcaaaaaattaaacatagaactaccatacgatccagcaatctcactcctgggcatacaggccgagtacctctcattcaaaatgtgtgggatcagcaatgtttcagacattgtggtcttcagaccagatgacttcagattttggaatactggcatcatacttaccattgtgtatccaaaatccaaaaatccaaaatccaaaatgcttcaatgagcacttcctttgagcgtcatgttggagctcacaaagtttcggactttggaacatttcagatttgggatactcaacctatatacctaaaggaaatgaaagcagggactccaacagacatttgtatacccatgttcatagcagcctcattcacagtagtcaaaaggtggaaacaactcaagtgcccattgatggatgaatggataaacaaaacaagatctccacataaaaagagaatatcattcagcctcaaaacagaagaaaactgacatatgctacaatgtggataaatcttcaacacattatgctaaatgaaacaagccaggcacaaaagaacaaatacttctgattccacctatatgaagtctccaaaggagtcaaattcctaaggacagaaagtagactgctgttggccagggctcaggtaagagggaatggggagtttacatttcctgagtacagagtcagtttgggaagatgagaaccttctggagatgcatcgtaatgactgttgcacaacgaagtgaatgtatttaacaccactgaactgcacacctaacagtgggtaaaatggtaaattttacgttgtgtatatttttaccacaaaaagagttgcatggttttaagccacaagtttgtggtaatttgttacagcagtaattgaaaactaattattgaaaactatttgaggtgatggatatattaactagtttgctttatttcacattgtattcatagattataacatcactttgtactccataaatttacataattataaatgttaatttacaataaatttttttttttttttttttgagacggagtctcgctcttttgcccaggccggactgcagtagccctatcttggctcactgcaagctccacctcctgagttcatgccgttctcccgcctcagcctcctgagtagctgggatcacaggcgcccgccaccgcgcccagctagttttttgtatttttagtagagacagggtttcaccatgtcagccaagatggtctcgatctcctgacctcgtgatccgcctgccttggcctcccaaagtgctggggttacaggcgtgagccaccacgcctggccaaaaaatttttaaagaaaactattggccaggcacggtggctcacgcctgtaaccccagcactttggaaggccaaggtgggcggactgcatgaggccaggagtttgagaccagcctgggcaacatagtgagaccctgtctctactaaaaatacaaaaattggccaggcacagagactcatgcctataatccaagcactctgggaggctgaggcaggcggatcacctgaggtcaggagcttgagaccagcctggccaacatggcaaaaccccatctctactaaaaatacaaaattagctgggtgtggtggcatgcacctgcaatcccagctactcgagaggctgaggcaggagaattacttgaacccgggaggtggaggctgcagtgagccgagatcatgccattgcactccagcctgggcaaaaagagcaaacctctgtctcaaaataaaataaaattaaaattcaaaaattagccaggcatggtggcacgtgcctgtagtcccagctactcaggaattgcttaaacccaggagctacaggttgcagtgagccgagattgtgctactgcactccggcctgggtgacagagtgagactctgtctcaaaaaacaaaaacaaacaacaacaaaaaaaactttaaagaaaactaatatatacagtgaccattccttctctttccttccagatccttctatggcattctctttccaaaggcctctgttctctttgcataagagctctgtgaacatgtctacctaactcagccagctttcttcaacaagggaaatattaaaccaccaagactacaaaaaaaaccctttccaacggcacaaggaggaaccaggtgctcgcctctcccatgtgtcgggaacaggctcggcacaggtgtgctaacttgaattaccaatcaacatgagtcaccaggggacttgggccctcagtggcttccgtgtggccaggctacgcatgcccagtcagcatttgcccagtcggatttgcacaggcagggccatcacaccccatcagccaggacctcacaaccggatgccagaggccagctcagcacctcagagacgactcagttcactcccaccgaccccacctcaccccatttcacaaatggtcacactgacaaccagagagagggttgtggcatgccaaggtgatacagcaagaccctaagagggctggtgctgaatcccccactcccaggctagagctcatcgtccccagggcagggtgggtagagaggcttcctgtcctcagagctgctggcggactcaggcccagttctctaggatgattctttttgttccatcacgggggcagcccatgggagttcaagcctgggttgctgcttcctgcccgaggcaacagcaggtacagtgggaagaccagcgctgaggagagattaattttgcaatattggggaataactgccttccaggaaacacaccgaagggggaagagatgtgataaaatcctgcccctcctgtacatttcacctatgcactctaatcagatttttatggtctccctcttcatatagacagcaaagggtcacaggacatctgagaaagtctacaccaagaaagggagagaccaaaacagaagaaaaggaaccaaagaaacagacaacgatgagaagtagaggacaaaaatataatcaataatatcctcagagatagaagagaaccaaagaaacagacaatgatgagaaatagaggacaaaaatataatcaataatatccttagagacggaagagaaaatgttatatccacaaagcaaaaagatcagcaaagcaatcattgtgaaatttgagaagagaagaggcagaagatactaaaactttagaaaagaaagaacaagggtccttttcaggggaactggaaggacactggacttcaacagccacactagaaactagaagataacagaataatgtgttcagtgttcagaaaggaaattattttcagcttataattctatagccagctaaattatccactactggatagagatatttggaatggatatttctatccattagggaggaatagagatatttgcaggcacacaagcttcaaaaacaaaaaacaaaacaaaatctacctcccatgcacttttcttaggaacttctggatgatttcagcaaaatgagacataaataaggaaaataaagaaaataaaatatataggatctaggaataggagaatctaacacagaagactgtaaaaagaagtcccgggacaacagctgagcagcaggcctgcggagcaaccagaccagtttggaacaatagatacacagaaaatcaggcccccaaggagggaaagcatccacctgaggaatattgggacaggaaggattgtactcctaatgtgtgaccacggcacattacttgcacagcatcgaacaatacaatttatggtcacaataatgcatacattaaatattgatgtatgtattggttcctaatctaccaagcaggaagtcaacatatttcaaaactgataaattaagaaacagtcatataagcctattaattaaaaatagttaaaaatgattaactctggagaaagggaaagaggaaggatgtgtcaggggactgctggcttcattataagccttttggatcaacatatttggcttttttcgtgtattattataaaatatttttacaatatagcaataaatacaacatatatatgaattataaagcacaataaaataagcatcctttatcatctaactttagaaagagaacattacttctgccaggcgcaatggctcacatctgtaatcccagcactttgggaggctgaggcaggcagatcacttgaggccaggagttcgagaccagcctggcaaacatgtcaaaaccccgtctctactaaaaatacagaaagtagtctggcgtggtggcgcatgcctatactcccacctactcgggaggctggggctgcagtgagccaagatcgtgccactgcactccagcttgggcaacagagggagactctgtctcaaaaaaaaaaaaaaaaagacagaatattactacattcttcttcttttttatttttttgaagaagtctcttgctctgtcacccaggctggaatgcagtggtgcaatctcgactcactgcagcctcagcctcccaagtagctgggattataggcatgcgccaccacgcccagctaatttctgtatttttagtagagacagggtttcgccatgttgaccagcctggtgaactatattcttcaactgctttctgaaaaaacaggcatatattttttaggggaaagttaaaataaaacactagcagccagtctgtgagactggtaccaacatctgcagtaggtccaggttttgtggggcctgaagcttatacaattttaggaaccctcttcaggacaaagaatacaaaaaatcttagttttttgcaaatgttataaaccatatgactctgtgaactcactgctagtgcccctcccacggcccctcactagggtgctacaagtccggggacctgaagcttccacttcattagcttcacagcaatcccacctgggtttatggaggcaccaggggctgggctacaccccctaggatagggaagaaaaaaataaagtcctggcctgcatcatgctttccctctagctagcgagataaacacaatagcgcacttccagggaaacacacactacaatatttaagagccactcctaggaagagtcggggggggaagacaaagaattcagaaaatgtgttccctggcagtggagcataggggcgtctgagaaactggcttctctctgaggggccttggcaaatctaagccctcccagcctcgtctacctcacctattttcaatgagtgcgcctgcagggcctcagtggtttgcatgctgcctcccagaacctggggctcctgaaggttttggagctcaatagcattatttcattggagggaggaaagggctgcaaaagggagactctggcttaaatccttcaaaaatattaaaacaggagctctggcaacaagggccccatatttctgcatggtgacactcggctagggctggcaacagctgcgcacctccctccctccttcagctgccgggctgtccttgcaggaatctgcatttgtgatcacaggagtagaggtttaccagggcccttccagttggtgtgttatgagccatctcatctccttatgaatggccggcacagacccgtctctcaccacaggctgaggaagagaggcgaagaagactgaagagtgtgatggcagcagtgtgtcccccagcctctcccggaaaggccctgatgcccatcagccagtcctcggggcctgttcaaaccactctggaagcccagccccttcaagcctgggagacttaacagagtgtatattccagctccaaatggctgagcacccctgctctacctagaagcctcaggaaacctttccaaatatcccttatcaaggtctgctcttcagatggtgacaatgtccccagtcagccgcatgcaactggaagttcaaggacctgcagctcactctggaggagaaaacaccttcacttgggaatgggctgacccttctgcagctggcatcctaagctgtgtcaagcagtctggagccaagagtcactcacactgggccactgaggaacagcatgaaaacagaaggtacctcagggacatgcatgatggagagaagcacaaaaaatgcatgtccttagcccagcccagctcagcactttcccttttcaggacacctctgcttaggtggtccctctagctggtctgacctcctgtctcctggccttccctgagtccagatgaagttccaccttgtattagtccattttcacactgctgataaagacataaccaagactgggcaatttacaaaagaaagaggtttaatggactcacagttccacgtggctggggaggcctcacaatcatggctgaaggtgaaaggcacgtctcacatggcagcagacaagagaagagagtttgtgcagggaaatttccctttataaaagcatcagatcttgtgagacttattcactatcacgagaatagcacaggaaagacctgccccattcagttacctcccaccaagtctcttctacaacacgagggaattcgagatttgggtggggacacagccaaaccataccatatctctttcaggaagcccaccctgatctcctatccacaatgctcactcttcttggaactctcacagcacttgtcctaaaatgttttccatgttctctaatgttctaataagctctcctttttctaactcctaggatagatacatatattacatccctatatattacctcattaacctccacaatgctcctattggataggtattatcatcctcattttataagcaagggaacgaaggctgagctgactcttgacatgcaaaggtcacacacccaagtgccagagccagacactttttttctaggcctccccatgagagcatcagtgctacaggctgtaggacaggcctctcttcctgtcccccaccaccacctgccacagggctggcactgtgaggcccttgacacatactgaatactggcaggaaccccggtggactctgactcatttctttcactctctgggtggcacctgtttcggtagcctctattacgtaggccccaggaattctgggggcagggaggacacatctaggacattcccctctctcccccacctcaaggcaggaccttaagtgatgtgagtgggagtatgaacatctccagctctactgagaagggggtgggggccctgggcgtgcactccagagccccaatgtcctgcccttgctggtcacaggtgccattaagtcaccgaagccagccagccagcctcagggcagcactccaccaaccctgaccatattttcccaggcactaaacaaaaagcctacacaggtgctgttaagcattcaactccccacccacatgccaggaactaaaatagctgtagcgtatgttaatcattagccaggctgcacctcagacctcccctctgagggctggcacctggggcagctcagcctggagaaactccagacaaggcaggctgggagagtggcagcgtccggagcctcaccaaggggctgaacttgagcaagcaggttctgaaagacacttcttcaagataaagtcaattcccagtgcactagcatttggattacataagaatcctaaaatactggagctggaaagggccttcatgaaatcatttcattcaacctgtttattttatttgaggtgggagctgagacccagagagcagaaagactctgcctgaggtctcagagctggctgggggcaggacaatgactagaaccacatctctggatttccaggccagtgcattatgaaccaggctggtccccaaccactcaacgtatttctgggctccatcacaccttctcaggctggagaatggacttgagaaatacaaaggttaaaccccggaaagagaagaaagttactactgcctcccaaataatgtcccatataatcaagccactcagaaaagtaccagccactccataggagccttatgaccctgtttctctccagatcccctccctatgtgtgatgacaacagagaatgggggttggcaaccactgctctgatctctcaaggatattaccagccacggagaccgaacatcacccccacctcagttcagggttcaaatagcctctgccctcaaactctcctagaaacagtcacctaggtgtcatatttggggttgaagaagggaagttgggaggaggtagcacaaaaaaataacccctggccgggcgcggtggctcacacctgtaatcccagcattttgggaggccgaggcgggaggatcacgaggtcaggagatcgagaccatcctggctaacatggtgaaaccccgtctctactaaaaatacaaaaaaaattagcaaagcgcagtggcgggcgcctgtagtcccagctacttgtgagtctgaggcaggagaatggcgtgaacccaggaggcagagcttgcagtgagccgagatcatgccactgcactccagcctgggcgacagagtgagactccgtctcaaaaaaaaaaaaataacccctatcccactgggtcttggagggggcccctcgatcccatggggtctggaagatctggtggtggctgcagcaatggagtatgcggatgccagacctgacggctgggagcagcagatgactctcggggcatcagcaaagccacagcagcttgccagcttgtgcaccagcccacaggaacagaagctgccttgcttgcactgcctgcgggcttgccactgtcatgagaaaccattcccacttcctaacctgaggaacacaggcttagccaacagcaagactgataagcatagtagtagtttcaaattcaggagagcagtgggtggtgttccagaaacttctgattgtcctcctcaaccatctgttctctcttgctttagtaacagaacacaccatagcctggcacacagcagcccccactaaggactgctttccagacccctagcagctaggagggcctgccatggggatgtgaaagtgagctgtcttgggccatgcagttaagggaggcacctagacggtgctacccaacatgtggcccggcggcattatacaatatgggagcctgtaagcaattaacgtgctcaggtcccatcacagacctcctaaattagaatgattcagggtgcagtccaagaatctatgctttaacaagccttccagattgttcttatacatgctcaagtttgaaaaccacagcccttgagaatgctagggacaacagtccataaggagcctggtgccaagacaatctcatggaacacacacttaacctcgaccctgatttttcaagaaagagtgagagagtgagtgagagagagagagagagagagacggggctcctctcttcattcacaaccaaacctgaaacgtaatacaggtggcgtggggaagatgacgatgagaaacttaacccaacagcaaaaatcaggaaaggaatgcatgcaagtataataagtaataagcaagatgcaaagaataaaatcaagtatatctggtatgtcaacagtcagaattcctctaccaaagacagaaaccatgcaattaggtttgttgctgttatcattgccttctgtcaacctccatccaccctcaaccacgttctgattataagagaaacaaattttatttacgaagattccatcttcaagataaactttttttttttttttttttgagaccaagtcttgatctgtcgtccaggctggagtgcagtggcacgatctcggctccactgcaagctccgcctcccgggttcatgccattctcctgcctcagcctcccgagtagctgggactataggcgcccgctaccacgcctggataattttttatatttttagtagaggcgggatttcaccgtgttagccaggatggtctctatctcctgacctcgtgatctgcccgcctcggcctcctaaagtgctgggattacaggcgtgagctaccgcgcccagccaagataaacttttttaagtgagaaagaaatatttaaaactaagggttgggcaaagacataccaaataaatgcaaagaaaaacagaggtggaaatattaatagtaaaaataggctgggcacagtggttggctgggtgcagtggctcatgtccgtaatcccagcactttgggaagctgaggtgggcagattacttgagcccaggagtttgagaccagcctgggcaacatggcaaaaccccatctctaccaaaaatacaaaaattagtctggtctcaaaataaataaaaatgaaaaaatatgtaaaatttaaaaacatatatgttgaagacttttcgataatcctgccttagcaagccaaggggtttttccagccatttctctctggcatttgcctttatctgtaaacacagtacttggagaactactcactaggatctcagggtacaacaaggcatagcctagtccagcccgctgagacagtttatgtggcttaaaacacaagcacagagatgagcttatgacttggggcccgcgtctttctgacttctggccctgagaagtgtttgtactggctactctgtcaaaaactcatcttgctgtctggaatgaggaaggaaatgcgtaaatgagaggcagagcagtccgcttcttggacctacaggaaggggcaggaattgcaaagtgagagaagaggttcccaggcaacgtcccaggagtttgcacgcaaatctcattttatccacccctcctaaaaatctggctatcatgggaaccattaggacagccaaggacagggagctcatggtcatcagtgagacctgattactaaccgctccatgtgagcctgaacagaagctaaaggggcatggcttgaatgtcctctgatgcctgcatttaaatttctgagcctttcacttattatcttataaaatgcacttatttattaattttaagactgtaaagaaaagagattctcccagatccttggccatgtattctcctaaaacacagacaatatggaatttaagaccaaagaccaaaggcattaaataaccagcaaatgacaggtaggaagatcagcttgataagcctatatacatgaaacacgaaagccaaactcaaaaggctagaactcccacaaatataagtagagctggactttaaaaaactacagtgagagtttttgttatacctctcagaatctgacagccaggcaagcagggatataagggtaactgaagttaagagatctatctaaagtcagcgtcccgcagaggacctattttctcctttcacgcccatgaaacatgttaatatttatcatgcagttggccacaaagaaaatttaataccagccaggtgcagtggttcactcctgtaatcccagcactttgggaggctgaggcggggcggggggattgcttgaggccagggctttgagaccaacctgggcaacatgcttcattcactcattcattcattcatgagaatgaatccactttgtgaaagaagcaaacccttgcaggtacctaggtctgcctgagcacggagcgccgtggggagggatgtcagtggcaggccatccacatgttcccttctgggattggaaagggagcaggagggtaaatcgaggcaacagaatcaaacactccctcaacgacgtcctcttcgccttcaaagccaacatttcagagcctgtctatcatcagatcctcacgtcctgctactcctcacccattcactccaacctcgcttctgctcacatcatcccaccaaagcagtgaaggcagccacatctcctccatatcactcaccacagccgcgatgccaagctgaccactccatcccacgaagcagactcaccctggcccctgggatacaactctgtcctggctttctgggcccctctcaggtcgctctttttctgggtcctttataggctcatcttcctttactcagctgttcgaggtgagttcttcaatctcgctgtgcccatgacttcaaatacaaacacaacctagacaaatgtctgtctagccaagacgcctcctgagccccagacccaccagcttatttggtatctcaaagacacctcaaacacaacatgtccaaaaccaaatacatgatcttcttcatcctccaaacctggtcctcatccagtgtcccatgtctcagggacaccaggtggatgactctagggtgagtgggggcggtctctccttttaagcacaccacgcagggcgaggccaacagtgggttctcagtaataagcagttctacaggaacatgccttgtcacctacttcctaaaaatagccgtgacctttttagtggacacagcaagctcacatctgttatcaccactccttccccactgtcacacgcaccctttcccccagtggtgccactccccaggctggatatgccatatgctccctagcctccctgtgagcagcctccacatttctcttctctgccctcactcagatttcccccatctcatgtcctccaagtcagccatccccaagtgtgaggggcaggggacacctgacttccttctcaatttcctttccttcttttctgctaaggcggagcctaagcccctggaaagctagagatcccagaaccaggctttgaccaccgcacactccaccctctgcttcacagctcctggcagtcacacacccacggtatcaacattgtcatcaccacccgctaactgatctcaaacccctttgcaaacatcttctcatctgattctccattccaggcaggcattttatcatccagaactgttctgtgggggggaagcggggggtctctgtgtggctgggtggcttgtcctaggatacctagcacagagaactctgtcccccaatttcttagttgcccccacccattccttcctcacatcagcatgggcaaggccagctgtggtttgggtcactgttcaggctgtacttttaggatcctcccaaatagcaaacaactatgtgactatcaggtctttatttcatgggttataggagatagggtcagtaagcctaatgtgtaacagtttcagtggttattacagagttccattgaattgcaacaactccctttaaaagcacaaactcccaccaagaaaatctcagtttcttcattaatcctaagagctttcctatctaggtatcactcaaaattcctactattctgggggcaatgggatcagagggtgttgcagagaaaaatccagagaaagtgaaaagtctacttccttggcagtgctggtgaagcatacccttacacagacgcttccccatgggaacaagtgccaggaactgcttcaggcttacgggggaaaacagtggctaagaagagagaggaggccgggcacggtgactcatgcctgtaatcccagcactttgggagactgaggcaggcagatcacctgaggtcaggagttcaagaccagcctggccaacatggtgaagccccgtctctactaaaaatacaaaaattagccgggcatggtggtgcatgcctgtaatcccagctactcgggaggccaagggaggagaatcatttaaacccagggagcggaggttgcagtgagccaagattgcatcactgcactccagcctgggtgacagggcgaaatctgtctcaaaaaaaaaaaaaaaaaaaaagacagcagaagaagaggggtgaatccaggaggaaggagggggtgcaccagaaaggtcccaggacctctgatgttccagcattcagcatgcattttggttccacattcagctcctgcccacaccagtttcttttctctattctacaatttccaagaagaacccacactaacctattctgtctcaactcccactcctgtcatcccaagccacacatcacctccccaatcacgtgaactaggcatcactaatcgatcctggccttctagacacatccacccagggtgggccctttctatagtatcatgcataaaggcgtcaggtgaggcttccactcccacctcttagtcccaattcatctccatctcaccctccccacgtttctctatccaaacccagccttcaaggtcctatattttaaccacagggaaaccacttccctgtgctgtctctgttgttcaactaacgacaactaattttctgagcacctacattaggcaaggcccatcctgagtgctgccaccaagaggtaagtcagaaacagcccccaccctccagagtcagaggacagggcagcgataagccacaccgccacacaaatactatgcaaggcgagagatgagaaccgagtcagtgccagaagggctgagtgagctcagagcatatcccgtccctcctgctgggagcaggcacccggatggctcccaggagggtggagaatgctaggccagacaggggagggagggcattccagtaagacagagagcatgagcttagcatgagctaagccagaaagacggttcaggagaagtgcatttcaactttagctgaaccttccactgctactatttattgacccttacacctgattatttatgacccaggcctgcctcacacactttatggctaatgtgggtgacacccatctgggatacacaagtgtggtgcagcagtcaccacctgttctgactggtccgtacctgagctctgtattgttattaaataaatgaatgcactgaatctcacaagcctgtgaggcagggattactattacccccattttacagatgaaaaaccaaagcacagacaatagtcaaagaaaagatagcaaggtatgcaggagcctgaagtagtgggcacccaatgccagggcaacaaactgccctggcacctcacctggcctctcttatcagggaacaccttgcagcacaaagaatgccttgaggaaaggggccctgttaatcccctggaatccccaacaattgactgccgcataaaaggaatgaggaaagcaatgagagccagtgaagggtgagcataccaggccctgccctgcaaacctagtccctgttgcgtgggcagggcagggcagggcagggcaggggctcggcctcacagctccactccatgcccagcgcagagaacagaggggagagctaccacaaacgccgaatctctacagagaggtcaaggattggagggcagagacagaaatgccccgggctgactgtttccagcttgggctagcactggctggcttaacttttcccctccaaagtctctaggtaacaaacttcgcgtgtctcctttaaaccaacagaccattttacctaagtcttaagggcctggcctgcacccatgggagatacaagtccaggaatcccttcctgaaactggggatcaaggttggggaaggggcgaaggcacgcacagcacctgggatggctcccgcattccctcaaacactggggagagttccttacaaataaactgcaatggtagcagctcccaggaatgtgcgtgctcccagtttcggaggaaagttcctgaagatagccttctctgcttaatctccccaagcctcgcctagaagggcgcgcgcaccctggagggctccgcagggctgcggggccgggcctccggcacccctcccgccacccgttgcctcctgcgcccagggtcacggcccctggccctacccaggcccagactgagaccccgacccctgagcccggggggacggcgagtgcaccccgaccacacatgagggagcagccccagacgccgaggctgatctagggggctgccaggccgacacggcccgcccgcgacccgccgacgccctcccctgccccccacccccacgcctgtagtgcaaccaggaagccgcagggccgcgctgggctgggcgccaggcagccccgggcctcacccgcggcgccgcggtgcactgccgccgcctggtcccaggcccccagccggctcgggaccctcactcacctggccacggggactccggacgcgaggggcgaaatgggacgtgggcgggagtggctctctccgcgggcgtcccgggcgcggcgcctgggttctgcctaggggctgggtcccactcccgctcgcggggcccgcggggcactcggggcactggggagccgcgggcgcagcagccgtcagcgccgggcggaaaactccgcgggcgcggctgccccaggtgccagaggcagtgcaagggaggggcggggcctgagcgcggccccgcccccaagatgaggactgggcacggcgggcccgcgaggagcagcagccttccggctgcggagctgctccaggaagtctcgggctccggaggtccctctgccgcccctaacccctgcggcgcccagtgccgcgcagagccgcattcgccctcctgcaggggtgggcatttcctaagtcctctccagccccgtgtgcgtcggttagtgactctctttaaggtcgagaaaactttttacactgaaaaggtcaaacgcatttcctttatagcaacactcggtggtggtggaggggggaaggtcacgcacagtatgtgaggaagggagcggtcagtgactatcgtggagaaacctgacaaaccacccagccgtcaaggtgacctcgacaggggtaaatcatactgattgcatgcaccgcttgtggtcttcctcccaagaacacctaaccccactgtaatcatgaggaaaacatcacaaatcaattgaggcccttgccatatacatgaccagtactcctgaaaactagcaaggtcatcaaaaacaaggaaagtctaggacactgtcacagccaagaggaacccacggagatataaaaatgacttaagatgttaataataggaaaagcccgggtttatgagaattccctgtattcacactttttctgtaaatctaaagatgttctaaaaataaagcatatttttaaaaggtcacccaggtaatatatgcatatatggtaggtatacaatttttttttttaatgagtggtggctgacgcctgtaatctcagcactttggaaggccaagacaggaggatggcttgaagacagggcttccagactagcctgggcaacatagtgagacccagtctctaaaaaactaaaaataaaaaattcaaaaaatgagtaaaaattgagattcactcttccctccactcccccagcccactcttaggtgtgtccttccaaatatctctctttaacactgtgtgtgtgtgtttacataaacgtattgtttacaaaacgatattgcagtacttttctgcaacatgtttttttactcactatatcttggagggtctttccatacaagtgctcctgaacagacctggttcttcccatccactgcacactgcgcgccatcgtgcgcttcaccattcttcattacctagctccttactgaaggacatttaggttgttgcctatgtttggctgttacaaacaagctgctggttcgattttcctttttttttttttttttctgagacggagtctcgatctgtcgcccaggctggagtgcagtggcgcgatctcggctcactgcaacttccgcctcccgggttcaagcgattctcctgcctcggcctcctgagttgctggatctacagatgcccaccaccacgcccggctaattttcatttttagtagagacggggtttcactatgttggccaagctgttctcgaactcctaggctcaaatgatccgcccgcctcggcctcccaaagtgctgggattacaggcgtgagccaccgcgcccggcccgatttgcgttttaaagtcgctctgaacaataaaatccggaaggactggaggggaggctccgaccttctccctgtctgggcaggtgtgctggtgccgggcaggaacggtgccttgggacagcctggccccggcctcacaacgggccccgggcgctcagtcatattccgtggccgctccaacaccccctacccccaccagcaggcgcggctctctttcggggctggactgcattttttggacatgagtcggcgagtgagggtgaaactcaggccaaagtctccagagccgctcggagaaaacgctgcctggaacagaagagcagaggatcagaggcaccaccagagactctcagagtgggttattaccctggtgggggcgcctgctgcggcgtaggagatggcgggactgggggcgcgggtgtgaagcccccaagaaatctgtgtgaatttcctggggaggtaaggtctccaggcgctctctctgggcccggggattggtccgggaaggtctcctggcgcctacccagcccccactgcctggacgcctgcgcctgctctgccgccccacagcgaccgcgaaggccagcttcttcgaaaggcccatttttctccgtggctgagcgaatgctcctagaataccacgtttataataaatcatgtagggtggaattcctgctggatgtatacacctttctgcatcagagctcttcaaacccagaatggtgaatagctacccctgggcttacccttttataattttcaacaaacctgcgtttagccccggctaggtgccagcaagttgctagggactgaggaggctctgcagaggacccgagctgaggccctaatcctcaaggccaatggcaggggtcaccgcccaggcacccccagagaacgcggtgtgaaggaaaagacaccaaactcggtgttcaaatgtgtgggatctattctagttctgattctgacacttgcaagtcatgcatcctccgagcctcggctttctcacctataaaatcttcaacgtgacctataaaaatccataaaatcacccctgcttcattgtttcccagggctcatagaaacatcatacaaggtaagggaaggtgagtgcactgtaaaaaatggtgacgtgctatatagctctgagtagtatggtatataagcttcctttttaaaaattttaattttagggccagtgttgggattacgggtgtgagttaccgcacccggcctcttttgttgttttctaataagtatatatgactatcatttccctcaaaagtctgctttagctgaatatcacaagttttaatatgctatgcttttgttatcacttagttatacatatttggattttgttgttgttgttgttacagagtctcgctctgtcgtccaggctggactgcagtggcaagatctcagctcactgcaacctccacttcccgggttcaagagattttcctgcctcaacctcctgagtagctgggattacaggtgcacgccaccacacccggctaattttttaatttttagtagagatggggttttaccattttggccaggctggtctccaactcctgacctcaagtgatccaccggcctcagcctcccaaagtgtcgggattacaggcgtcagccactgtgcctggccaatattttgttttttatgttaggattgtatgcttaattcatggattatttagacgtatattttccattctttttttgttttcaaacttcagttttttaaaaaataataataatcatttggggaggggcccagtggctcaggcatgtaatcccagcactctgggaggccaaggtgggaagatcgcttgagatcaggagtttaagaccagcctgggcaacacagtgagagcccctctacaaaaaaaaatttaaataaaaataaatcaatcattttgtcattgatctctaactttaatgcttggagatgaggaaatgtgttcttttagaatttgttaatgcctcctttgtggcctcatatacagactttttttggctgtcccaatttttgtgaacgtctcttcactttttatgtggtttttttttctctatatctctccatctagcttgctaatcaggttatttagatcttttatctcctgggttttttttttttttctctcctgttcaatccattgatttctgaaagagtaggtttaacatttcccacttttattgtagtttgtcaatttctccctctaatttagtctgattttgctttatactattttttttggttttttgatttttgtttaagaggcagtgtctcaccatgtttcccaggctggagtacagtagctattcacaggtgtgattataactgcagcctcaaactcctgacctcaagccatcctcctgcctcagcctcctaggtggctggcattacagccatgtaccacctcacccggccagccttataattttgagagcaaattattaggcttatacaaattaatattgttttatccttttatgacttattcagttttattactttttgtataaatattgttatcctgagatagcatttgtctagtatatgttttatttctccttttttactctttctgtattgttacttaggtttatctcttggaaatgacatattgttttttacaagatttaaaaagttcatctgagtttctatttctaatttgtgagtttaaccagttcacattgataagaataacagaaatatttgggtttatttctgccatcatttgtgttatacatatacccttgaaatggatattcatctagaacacattgataaaatcctataaattattacaaactggaattcttccatgctgcttggtaaatagctgctcacctgagaccccacagtgcccccactcctgaccttcttctgatctggcaaaaaagggtcaatgcttctcacagggagaccctctaggaccttttctaagattctaattagtcagcaaacaggctacaccagtggcttaatatttcaaatatcatgtacaatatgctttcttgttgtttcttttttctctttccctgcattcgtttggattgtttgaattttctttaataggagggaggtacaagaattacagatgtatcaataaataccagcctactagtacctttaccagaatatccctcaaaagctcaaatttatcatgtcaagaaatgaactttttctctctaaacctgctttttctcctgggttctgtcccccgctggggtaccacagtctgacaagccattccagctagagatctgatagcagctggatttctgtctgccagaatcatttttcaaatgctgtcaatagagacggattcaccaggaaactgcaaggccccttgcttgcatgggctctttacaaggtcctggtgggaaaggctttaacaatgtttgacatggtaatatgtttttacagactttgcaaaagtaagcgattttaagtgcaaatgcagtcatgcgttgcttaatgacagggatgtgttctgagaaatgcatccttatgtgactttgttgttgtgcaaatgtcatcaggtgtacttacacagaactagatggtagagcctactatatgcctaggctgcctggtatagcctatcgcttctaggctacaagccattgcagcgtgttacagtacagaatatgctaggcaattgtaacacaatggcaagtacttgtctatctaaacatgcctaaccacagaaaaggtacgggaaaaatatggtatgataatctgaagggaccatcatggtccagctcatctggcttctgtcctggggaggcaggtggaggcagaacccccgctgctagccagggaagagctgctagtccttcctgcccctgccgcctgcctgtcatgtgcccctgcctgaccatcatggtcccacatggtctgtcattgactgaaatgtcctcgtgcagcacttgactgtagttaagatggctggctctttccactctgatttcccctccatctcattgctcctcgtgcccctcatgttggaatggtcataggcatttttaggatctggcttgggatgagacagctttatgtagtttacagtcacttctgtgtgtggttgcattaccgctagtcttccagcgtaggaagggcttccaggaatattgttctgattcagccagcagggtcggagatgatatctaaataataaacatttccccagcacctgttttcagaaatatgtcagcagtggaggagaaacaagtatggagccagaaactagtctatggaaaactctctcccccatcatatgtatagagttttaagcatgtacggctgttcacatccatgcctatttaaaatggaagttctctcctgtagagaacatactcaatagtgcaatatatacacttataacacacacatataaatatgtcttttttgagcaatttcagtaaatgtattttgttagagctcctgtgtagtaaggcagaactagaggagtattgcaaatagaagtatgcttttgtgtgaaatgagatgtcttatgcatctcactgtatctgattgcatcttagcttgtctgatatattttattccaatgaagtccacaagttctagatgtctcgcctctcttgaaacatcgcattgcttgtgtcccctcgccctaccctgtggtctcctgtctgcacaccttcgctcgggccgtctccccagcctacaatggcattttctcctcttttcactttggctgctcctactcattctccaagattctgcttacttcttatcttttctatacattctctgacttcccttttcgcgatagtggactgagcacatgctgccatttctccacccaggcccatcctccaggaatgacagggaaggaaaaaaattagtgttctcaaaaagataacaggaaatgttcagagaatcagaagcactgacacgtttctgagaagccaaaagcagacaggatctgatttgatactgcagcccagctcatgagcagcagccaaggacatactataggtatactacagtatatacttcaataatgggaccagcaacaaggcattccacacccagaggtggtgaatgcctggaacaagactcgggaccaaagggctactgacagagggttaaacaagtatgcccgtggaaggagctagatgaattgaccctgaatatctccctcaaccccaccccggcagacaagatgaccaggacagcagtgtctgtctcctggtatgaactgtgttaggaatgaaagacaggacagggccccatatggctggcaaagccaaggaagagttaagtagcagccacatcccaaagaccagctgtgagagcacagctggtccacctgatagtgcctctgcctgttctgcactctccttgaaagcaacatggagcacaagctcatccagcgatttccagccctccctcacagcaagctaggccagcagatttcttgcagaaaatttcatgggtaaagatgagttccctgtcaaaaaatatcatttgagaagcaccaccatgaaagggagacgtccacctgaggaaacataataatcatagctaatatttactgagcatttatgtgtcaggcactattgcaaacataaagtgggactattttatgtttgcaatagacacatgaataccttacaagagtcctgccttataagagtttaaggtaggactatttttattgccattttacaaacgaagaaactaaagtgtcaagtgattaagtaacttcgtccaaagtcacatagcttaacatgagaagccacagattaacctcagctgtctggctccagatctggagattaaacagaacaaatagacaaccagtaatgtgctttgaagtaagtataatgaatattctcaaataagaaaggataggaaagaatcaattagggatgtcagagatgaacaatgtgttcattttgtattactgatcatgggaataaaaaacaaaaaatatattcatagtttaaacaaataaaaccacctgagtggatgagctatggagtggaatgtatgcagctaaagagctgattagtgaactgaaagattggaatcctccctgaaaacagcagacttggataaataaatagaaagtagaaaagaaaagataatagacatggaagatagttccagaagtgccaacatccacccactgggtgttaccaaaagagagactgctagagaaatggatgtccaatgaaacatggttgatttgcaacacaaatttatttcctctccctccccaaatcctaataaaatggcagtagaggaagagcacaggtaaaatccttcaaggacagtagggacaagagaggagaaaacagcaaccaagaatttggacacgtattttggagatagtatacaaaggagtggtaatttggcagaatggtgcatgttctcacttggatgccccagagggagaaaataagaagaagccaatagattctcgctacttcacccccagagtctaagaaaggatccacacttaaagaggtgaggtacagtgtgaggctgtaaacaggaaaacagaggcataagtggaaaccctaggccactttctctaccctcttcagccaggggtcccctccacccaggggagaaaggagagttatttgtcatataaattgaactgaagaaactgtagaatgggaggtctgagccacacaggtttgggaggaggaggtaaggacaagtttaaacacaaggattaagccacaatctacatattgaatgatgggaccccagtccacagagagtgagtaacctaatttacaatctataggccagagtccggaggattcatttgtggagaaaaggaatgtcccacacaaagggcctccaagtggctgatgtgtgctggtttcctcaatgaggagctgacctgatgctcagacactctgtggtgagctccgtcagtcaaaaagccccgctcccccacagagactgcagtcagtgttttgtgcctcacccccaaatgtgaatacacagctaggggtcaccacctgggaggaaggcctccagcaagggtgaccaaccttcctggcttgccagggaccgaggggtttcacaggacatgggacagtcagtactactatggtttgagtttgtccccaccaaaactcatgttgaactttgatccccaatgtggcattgttgggagatgtgcctggtgggaggtgtttgggtcacagagacagatccctcataaatgacttggtgcactccagctctctcatgagagtggatttagttctcgtgggaatgttcctgcaggaatgggttgttgtaaagccaggatgcccctcaggttttgtctcttcccacgtgtccactcaccattgagattttccaccatgttatgacatagcagaaaaagcctccaccagaatctgagcagatgctgacaccatactttttgaacttcccagcctgcagaactgtgagccaaataaacctcttttctttataaattccccagcctcaggtattcttctatagcaacacttaatggactaagacaagtactaaaataagaaaaatctctgccaaaccagaacgagttagtcgtcctattctagcatgtgcaagcaacgtccatttgcatggctttgcttaataatttgcaagcctgacctatattcacagctcacaggctgagaacacagtcatctgctgtaatttatataatcttgtgacaacacctgccaaaaatcatattaaatggcttgtgacttttcttgatcctcttccagcctttgacacaatatataaggaaaaatatgaactatcctgcttgtaatttccagtgggtaaaacaaagatgtgtcctggatccttttatttttaacttgaaaccatattgagatatcccattagtttgctttcctactgacccacataactgttaggcacagtgcaggctattgaccagtgtcagctacaaaggatcagtatctgtgcctgcaggttgttgtatacggtagggccccgccaccctgctctgcagtggaacacagaaggtcaggcattctctcagatgcaaataacctgatgtgggtatcatggactaggagtagttttagtagacaatgaatactgctatctaatgacctccagaaacaagggctaccaaatctggatctgaaataatcattttaatggaaataccccaaatttagggagatttataggaaataatgataaacaataaatcatttagttactttgggtgcacacttcacaaccagttttaacagggcttattgctcaaaattagatggaccgcaggtatgtgtgtgtgtgcacatgcctatgtgtatgtgtagccaaacaagatatatagttacatgcctgctttacatttttcctgggctatttttattgccattgcattttatgatgtggaattgtagggaatcagttacccattcattgccctgttagggaactctcaaatttcctcctgaagagaatcttggctctgcctgcagggactcccctgatgcactttggaggggatgtgggttggccttctcttcagaaacacgttgactttcctctttctttctctttctttctttctttctttctttctttctttctttctttctttctttctttctctccttctttctctctctgtctttttcttttttcttttctttccatgtgtgaggcaaagatttatttcttcatttcttgcatttgaagtactgttcgatgacatccttggcctgagactccttccatagtccttaactactgcacaactgcaaccaaccactttacagggtttcccctctctgtcaattgtacaggggccttcccattcccctagtttcttgtcgtcgtcacccttgattaggttgatttggtgttcagcacaatgggccttcaccaacttgacatacataggcttatcacagttggatgcaagcacacaaaggtgggcttggcgcttggcggcagcagggaaagagaggaatgttctttctggtgcatgagttttcatacgaggatctatgtcaagccacagctcagtttgttattaaggtatatggctcgtctcttaattggcaatggaaagttccagcattccaagtagaatctcaacctcagagccacactatacttttcaaaagcttggctaagagaaatgctactcgtggataagtgcctggagagtgcatgctgtattcaatcctctggacaaatattcttaaatctattaccaatttagccagagccatgaacctgtgagcttgactgcttcccactgactccttgaagaatgacttttaatgctttgtgctttggttgagggacatgatacacattatacaaagcatggttttgaacactgatccccaactgttgcagggatattgttgaggatgtggcttctctatgaagcctctctatgaacacctagaggagaatatgctctttggtcctcagtatctggaatagttgtgctttttcctagcaacctgcaaatattctggatctcataatgtgtcatatatccctctccccatcagcagctagggtcttagagccaaatcagtgaacaaccatgaggccacacaaagaggactaatcacagttggtgaggtagaatcagagcctggggtataggcaagacaccgtagtggctcgatctgccatgggcagatccagatgttgagtgtcagggaaccccctccctaggggagggtttgcaatgaacatggatcctccaaaccaccctaatgcaggtgcctgtaggccatcactgcctctgagggttagggttggggttagggttaggtacgttagggtgatgacatggcacacctggtcctatacctatacccttctctccagctctctatcctttactaacacacatggatggcattgttgggagcagcaggaactgcatgtgagtcaaatgccatgtgctttccattgtttcagccatcacagtccccaggggtaggtacattcacaccccaaagttcacttctattatgtcagccagggaagcagtatactagacattagcagtgtgggctctggagtcagggggccagtttcaaatcctgcctccatctctcactaactgagaggccttggttgagacatttagtctctttatctataaaacaagaataaaacactgcttacaaacactgctgtggcaggaaacacattacataaccactgtgaaccatttagaacagagcttaacccagcaataaatgctacaaataaatatattgtggtggtgaagactttggtttttggaattgaatacacctgggttcaaattccatctcttccaggatcaactgtgaaaacttgggcaagtttccaacttcattaatcctcaccttttccaactgcaaaatggggcaaatagtgcatacaaaactcatggtccactgcttgagatgaagtgtgtgctccataagtgatagctttagccacttgttattttactgctataccagagagaatgcagctcaagctaaacaggcaagagggaatgtctaaggtgattctgcagagctgccaaccctatgcagcaactgacctccatctccaacacatggtagtaacagctacttaaatggattgtgttctatgttctaggcaatgacctgagagtttttatatttttgttttacctgggactaggtatggtggatctcaatattttgggggccacaagtactgtatcagactggttccaatcaagggatagaaaccacaagtggttcatgcaatggaagtttaatataaagaattattcagctatgataaaagagcaactatatgatgcaaagagaaccttatagggctactctccctacaggtggagaagagtacccaagaaggacaagcttggaatggggccccctccccaggctggagatcagacattgttggagaaggtatcattgcagccccctacatagcagagagatttgctgagttgcatagtctagagctggttgcaattattggacaagcaggaaacaaacctccacagcccatgcgagccacactgctgggttgagtgtatgagcatgtagaatgattgggtctccagtgcggacagaaggcatggatcgcgtggtgcctgtgttgggaggatactaagagggcgatcaccatgccaggacaagactagttgcctgggatcttctgggcacgtgactggagcagagtaccactggatctcctcacaccagccagacccaggaagagaagctcctttcacctgcactgttctctcagcaccctccacggagaaagcttcatgttatgcttagtgtacaggagaaatgctcatgggaatcctgtccattatcacagagcaggtattagtgggtgaatatggagctgagaagtaataagttgtaactggcatagatatcatggggatatttgaagaacgctgtgaacacatatgcatgggtccatgtattcatgagtgtgcacatatgtgtaattattcatacaattcatggtggatactacttcgagggtgttcacagaccccaggcagagagcgcctggagggaaaattatccaaggcaggcccattcatagttccaggacagccagaagaaagcctccgttaagcaccagaagtctccggggcaggtggggccaggcagcatgaaagaattggccgcaagagttccaaaccctgtcccaattatggagggtgacttttctttgtcctccttctccattcccttccatattgctcatgcatccaaagggagacctgaagactctctagcagggcaaggccattttcttttggcatttttctctccccagagtctagctgattatcagcttagacacacagcaggctatgtgctgtgaacaacaggcatcctgggttattttacaaactcatggatagtcattttgaaaccacctttgcaaaattgtgactgaaacagtgaaagagagctaacttaaccagctccatcttgtttctaacctccaagctgtctttgttcattcctgggcgtaggctgaactaactttgggagaaacttagtttgtagttatagtttaaacaaagactgtgacagccctttcccaatgcagacctccttcttgtctggggactagactaacattagccacaggattagaaattacggtttaggagtcacgcagctggaggctacaagattctgaccctccctaaactgcttctaagatcagtgcttgagacatgttgcagaccccgcacttgctggatcagctgacgccacacagatggataaactgcctcgtctgatcttgtggcccccacccgggaactgacgaagcgcaagaagacagcttcgactccctgtgagttcatccctgaccaaccagcactcctggctcactggcttccccctaccaagttatgcttaaaaattctgctccccgaattctcgaggagactgatttgagtgataataaaactccagtctcccgcacagccggctctgcgtgaattactcttcttctattgcaattcccctgtcttgatcaatcggctctgtcgaggcagcaggcaaggtgaaccccttgggtggttacaattttgctccttcaacaaaactccaagttcctctttgatagtggcaaacaccagttgccgtattttctactgttactggcacaaaaagtccctgttcacagccctgctggacgtaagggcccaggtgctaaaaagttaccccccacctcaccccagcctcatcagcggggctggatactggcagtgggcagaggaatgaaatttatttatttatttttcttatttatttttgagatggagttttgctcttgtcgcccaggctgaagtacagtggcaccatctcagctcactgcaacctccgcctcctgggttcaagcaattctcctacctcagcctcctgagtagctcggattgcaggctcctgccaccacacccagctaatttttgtatttttagtagagatgaagtttcaccatgtaggtcaggctggtcttgaactcctgacctcaggtgacccacccgcctcggcctcccaaagtgctgggattacaggcaggagccaccaagcccggtcttttttttttttttttaacatgtcatgtttttattgtactgtactgtactgtactgtactgtactgtactgtattgtattgtattgtattgtattatattgtattgtattttgaaacagagtctcactctgttgcccaggctggagtgcagtggagtgatcttggctcactgaaacccccgcctcccagagtcaagcaattctcctgcctcaggctcccgagtagctaggactacaggccatgcccagctaatttttgtatttttagtagagatggggtttcaccatgttggccaggctagtctcaaactcctgacctcaggtgacccacctgcctcggcctcgcaaagtgctgggattacaggcttgagtcactgcacctggcgaaatttatttcgttagattctcaaaaaatgtatgacacatgagtgggactttctgcctccatcccacatctgccagagtaaggagagagtccaggagctaggagtattcagggtaagactccccctccctcggccacattgtcattgtcagagtgaagaaggcccctggaactccatgtgttcctggcaatccctccttcctcccccaccatagacaccccccaacatcgttattttccctgagagcatcaggacccgtcttcttagggcctttatctcgatatgcatcagtcactccaagaagctcaggcccctaagtcatcccttcccttatctcctaggcctgagtccacatatagctctatgtggctctctccaccactctctagccttcatttttccccttagcacatacatcacctgacatacaatgcatttgactgacttatttcttagtctcccctgattgagggtggggtgttctgtctctcttgtttgaccactatacccccaggatctacaaggtgtctggcatgtagcagggacttaataaacgtgggttgaggaatgaatgaacaaacaaaagcatctttagtgtcctctgttctctggacctcaggctccactgcagcctagttagtcttgatcttcaggcctaaacaaggcccaaaccacaggcctgcttccatactggcttatcccacctatctagcagtttcccaggctgggctttggagacaggtgggcttggatttgaatcctggctctgcattatgaggcttttaacaccccattttccttatgtgtaaaaccagaaggatgcctaactcccaagaatatggtaagtgaattaaatggaaggtgtgtgtaaagagctcagcacaactcctccaacacagtaagtgcacaataaatgtggccatgagggaggcaatagggcagggtgaggaggagcaacaggcttcctctggtgacatctcctacgagttggtagaggaaacctggcgcactgtgcacagtggattctggtcaggccctgagctcaaggggaaagaatcccatgattgattactgatgtctgtcatgcacgtgcgggccgggtgacagggtagggtgaaagagagtagcagccccaagccatacgtttgccatcctgatctagaatttccaccattgctccttttcttgtgcatgtcttgactgtttttaagggtgagagctcccctgttttcaacagctcagttctgactccgtaatttctcacccaccccagccctgaatggtgcagtctgctcctctgagccccaacactcttttctctgctgttcctttattatttaccatgtagcattttggtttttaaaaatctttctggcctcctttccacacatataggcagaacatgccttcagggtagatttcaccttagagaactaacgcaggaaagtgcacagagttgcaaatcagaaaatctgaacttgttgtgaatttgagctcatcgctttgccttttggagtctgtttccccagctgaaaagcagagccctaagatggctttgcagcccatggtatcccagggctgtggtgagaatcagcatttcactgggctctgtggagaggaaaagctttcatgtttggccagtcgcggtggctcacgcctgtaatcccagcactttgggaggccaaggtgggcggatcacctgagcgtcaggagttcaagaccagcctggccaacatggtaaaacctcatctgtactaaaaatacaaaaattagccaggcatggtggcgggcgcctgtaatctcagctaagcaggaggctgaggcagaagaatcgcttgaactcacgaggcagaggttgcagtgagctgagattgcgccagtctactccagcctgggtgacagagtgagactccatctcaaaaaaaaaaaaaaaaaaagcgttcatattctcattgcatgtccatgtaccccctcctgccaccaggtctcaaactggagcttctgcagatgctcaagatgctttttcagcaagggggtagtaggatgaggcttccaatgggagcagtgggcatttggcaggcattgacaacaagcagagttcggagaatggaaaagaaaaaccaacttttctcgccttaaaccggcaattgcaaagttgagagctaggaaagctaaatgctgccacctgccggtcattttctacgttagcagcatcaaagtaaacagttttataaagctcttgtttattttttattatattttattttattattattattatactttaagttttagggtacatgtgcacattgtgcaggttagttacatatgtatacatgtgccatgttggtgtgctgcacccattaactcgtcatttagcattaggtatatctcctaatgctatccctcctccctccccccaccccacaacagtccccagagtgtgatgttcccctttctgtgtccatgtgttctcattgttcaattcccacctatgagtgagaacatgcggtgttttgttttttgtccttgcgatagtttactaagaatgatgatttccaatttcatccatgtccctacaaaggacatgaactcatcattttttatggctgcatagtattccatggtgtatatgtgccacattttcttaatccagtctgtcattgttggacattcgggttggttccaagtctttgctattgtgaataatgccgcaataaacatacgtgtgcatgtgtctttatagcagcatgatttatagtcctttgggtatatacccagtaatgggatggctgggtcaaatggtatttctagttctagatccctgaggaatcgccacactgacttccacaatggttgaactagtttacagtcccaccaacagtgtaaaagtgttcctatttctccacatcctctccagcacctgttgtttcctgactttttaatgatcgccattctaactggtgtgagatggtatctcattgcggttttgatttgcatttctctgatggccagtgatgatgagcattttttcatgtgttttttgcctgcataaatgtcttcttttgagaagtgtctgttcatatccttcgcccactttttgatggggttgtttgtttttttcttgtaaatttgtttgaattcattgtagattctggatattagccctttgtcagatgagtaggttgcgaaaattttctcccattttgtaggttgtctgttcactctgatggtagtttcttttgctgtgcagaagctctttagtttaataagatcccatttgtcaattttggcttttgttgccattgcttttggtgttttagacatgaagtccttgcccatgcctatgtcctgaatggtaatgcctaggttttcttctagggtttttatggttttaggtctaacgtttaagtctttaatccatcttgaattaatttttgtataaggtctaaggaagggatccagtttcagctttctacatatggctagccagttttcccagcaccatttattaaatagggaatcctttccccattgcttgtttttctcaggtttgtcaaagatcagatagttttagatatgtggcattatttctgagggctctgttctgttccattgatctatatctctattttggtaccagtaccatgctgttttgcttactgtagccttgtagtatagtttgaagtcaggtggcatgacacttccagctttgttcttttggcttaggattgacctggcgatgcaggctcttttttggttccatatgaactttaaagtagttttttccaattctgtgaagaaagtcattggtagcttgatggggatcgcattgaatctataaattaccttgggcagtatggccattttcacgatattgattcttcctacccatgagcatggaatgttcttccatttgtttgtatcctcttttatttcactggaagctcttgtttaaattcagtaaagacccagagggaggaggtggcatttactgagcacctcctgtttataaggaactgtcttcaagtgtgccatgggtacagacataaattagcaccggatattgctgataaagagagcacagattccagagagccaaggctgcctctcaatgactacatgccttaggttcacccttcaacctctctgaacttcagttttctcaacaggtagatggaccagggtgccctctaaggatcccaaggaagggccttaaaagatgaagaggatgttgacagacagttactgagaaggaaaagaggagggcatcctatgcagacaaagaggagggtttcaagggaagtcctgacatgtgtctccttccctcgtccccttgtttgtgaagccgaagggtaagttcctgatctttaagcgcctgtccacctgtgacttctggtcaagggaagggacagaggagttggaaagacttcttgaaggaagaatgaaacaaacacctgtgttgtaggatccaccaactttaagaaatggaaccatgtaattacctttaaagtattctataatttatttacacattattgtatattttgtttacaacattctactgttgatggacatttaaattatttcccattgtctccaggtttatttgtttttctggcttggacatccatatgcatacattttttcttcttcttcttcttcttcttcttcttcttcttcttcttcttcttcttcttcttttcttttcttctccttctccttctccttctccttctccttctccttcttcttcttcttcttcttcttttcttcttttcttcttcttctccttctccttctccttctccttctccttcttcttcttcctctttcttttttgtttttgagacagagtctgtctcaaaagaccctgagactgtcacccaggcaggggtgcagtggcatgatcacagctccttgcagctttgaccttctgggttcaatcgctcctcccctctcagcctcctgagtagctgagactgcaagcatgtaccaccatgcctgactaattttcgtatctttttgtagaggcgagattttgccacgttgcccaggctggttttgaactcctgggatcaagcaatcctcccgcctcagcctcctaaagttctgagattacaggcataagccactataaccagccatgcatgcatttctgtcaattacatacccagggatgaaactcttggattgtagagggtgtacatttccaactttatagatcatcacgatttgttatccaaagaggttgcactaatttaaactcgtgtcaaaagtatgtgagttcctattgttacaggtagctagtcaggcatgagcagggcaggagagggctcgacccccacccccccaccagtaatgtcaccaaccatcaggcaattgttaaactgtctctaataatgggtcgcagcctgcaccagggaaaggccgtctcctaatagatagaacaaacttgaaactggtgatcagcagcttcccgataagatctcaggagttgggtgagtgggctcaagcatgcacactaagaggcaaaatggtggagtttaacttctagggacattcacctggtaggggaagaatgcctcaagtgagcatgcacacaactccagtaaacacactgcgtgctcaccgcccaactgctagcagaccactgcacacgtggacagaccactgcacacgtggacagcccactcccagggaagaatcaggggagaagggatgtacaaccctggaactatgtcaacagataaaaccccaagtcaaaggtcaaacagtgcacttgatctctcaagtcgccccctggcccttttccaagtgtactttacttcctcttagtcctgctctaaagtttgttgttgttgttgttgttgttgttgttgttttgagagggagtcttgctctgttgcccaggctggagtgcagcggtgcaatctcagctcactgcgaactctgcctcccgtgttcaagtgattctcctgcctcagcctcatgagcagctgggattacaggtacctgccaccatgcccagctaattttttttttttttgtatttttagttgagatggggtttcaccatgttggccagactggtctcaaactcctgacttatgtgatctgctcgcctcggcctcccaaagtgctaggattacaggcatgtgccaccgagcctggcctagttttttaataaactttcacttctgctctaaaacttgccttggtctctcattctgccgtattatgctgttggtcaaattctttctgctgaggaggcaagaattgaggttgctgcagccccctagggatttgccaccagtaacactatgattcactggaaaggcttgaaattgtcagatttttaaaggtttgctaatacagtggggtaaaatggtgtcttactgagttttcacttatttttaatacagatgaattaatgtatggggcaggggagagtcagtgatttcccagcctcccaatggggtatagaagctgacataccatttttcacagggtaaggaggagatagggaatgtagacaattcttttgaggggcagcaagtgatggttagggagaatgatcaacccaggagacagaaattaactgtaaatgattcgctttggaattggagcctgagaggcaggcattatgttatggaaaagaccatccatccatgtgtggttgcattcttcactcttcttttcatttcccagcttctaggatgtcccagtgtcttccctgtggatctcccagtacctgcaggtcacagagtaacacaggctgtggcagagtcacctgggcctcccagagcagggaagactaagcactggacaccaaatttttccacaattaaaaatacacatggccgggtgcggtggttcacgcctgtaatcccaacactttgggatgctaagatgggcggatcacatgagttcaggagtttgagaccagcctggccaacatagtgaaaccctgtctctactaaaaatacaaaaattagcttagtgtggtagcatacacctgtaatctcagctactcgggaggctgaggcaagagagtcacttgaacccaggaagcggagattgcagtgagtcgagatcacgccactgcactctccagcctgggccacagagcaagactccatctcaaaaaaataaataagtaaaataaagaaaaaaatacacatgtattcatacaagtgttgatattttgagttttttttgtgaaaatatgtttatttcatttgtctctttttctattatcttttttcttattaatatgtaagatttaaaatatatattctttgccagacgcagtggctcatacctgtaatcccagcactttgggaggctgaggcgagaggatcatttgaacccaggagtccgagactagcctgggcaacatagtgggacccacgtctctacaaaaaatagaaaaattagctgagcgtgtgtcatgtgcctgtagtccccgctacttgggaggcggaggttggaggatcacttgagcctaggaggtcaaaaccacagtgagctacgattgcactactacagtccagcacgggtgacagagtgagacatcatctctaaataaattaattaaatatatatcctagaaacaactcccttatcaattatgtgtattgtaaatcttacatcccattctgtagcttgcccttttaccttcttatagtgtcatttgaagaatagaagtttttaattataatataactgtggtaggcagaattctcacgaccctcacccttttaagatgcccccctgaagagtggacagaacctgtgaatatagcaggatgtcacttctgtgatcatgctgcatatatggcaaaagaaattttgcaggtgtaactaggattactaattggttgcatatgagttaatcaagagggagattatctaggtgggcccaacctcatcacatgatcccttcaatctggggtctagggaccagagacagaaaacttcagagagtgtcaaattgcaggaaaaacttggcaagcaaatctggctggtgtttttagttgtttgtttgtttgtttgtttgtttttaagacagggtctcactctgtggcccaggctggagtgcactggtgcaatctccactcactgcaacctctgcctcccaggttcaagtgattctcgtgcctcagcctcctgcatagctgggactataggcacgtaccaccactcccagctaatttttgtatttttttgtagagacagagtttcgccatgttggctaggctggtctcaaactcctgacctcaagtgatccacaggccttggcctcccaaagtgctgggattacaggcagtgagtgagtcactgtgcctggccaaggctgactttgaagatggaggaggctacgtgcagatgccctccaggaactaagagcaggtcctgcctgatagccgacaaggacctagacaaggaccccgagacctccatcctacaactttagggagatgaacctgtcacaagcatgtgagcgtgaaagaggactcagggctccaggtgagaacacagccctgctggcaccttgattgaagctggcaagaccccaagtggaaagctcagccacaccacgcctgggcctctggcctacagatccacaagctaacagttggctttaagctgctaaatttgaggattggttgtgtagcactggcaaacaaacatagtagttgtattcatcagcatttttctgtatttatttcaccttctgagcttaaaaaaatcattcttggaaggctgggcgcagtggctcatgcctgtaatcccagcactttgggaggctgagctgggtgtatcacttgaggtcaggagttcaagaccagcctggccaacatggtgaaaccccatctccactaaaaatacaaaaattggccaggtatggtggtgggtgcctgtaatcccagctacttgggaggcctaggcaggagaatcacttgaatccaggaggcagaggttgcagtgagccaagatcacaccactgcaccccagcctgggtgacggagggagattctgtctcaaaaaaaaaaaatcattctcataattgatattttcttctaaaatttttacagtttaatttttcacatttaagtattccaaatcaaattttttctatggtatgaggtagagctctggtttctcttttcccccataatgataacaatttttcctggaactacttattgaagagcccatcatttcttcacagatctgcaattacaattcagtcatgaatccaatttctatgtaaaggagcgttggtttctggcctctttattttgtgtcattatttaacttgtctatcacggtgtaattgtgtaaaccagtctgccttaattactgtagcttcctagttatctgctagatgtctgctaaagtaacttcctcatcttattcttcaagagtatcttggcttttggctttttcaaataagatttaaaatagattatcaaatttcattacaggctcactcctgtaatcccagcactttgggaggctgaggcggatggatcacctgaggtcaggagtttgagaccagcctggccaaaatggggaaatcctgtctctactaaaaatgcgaaaattagctgggtgtggtggcgtaagcctgtactgccagctactagggagactgaggcaggagacaggagaatcacttgaacctgggaggcggagattgcagtgagctgagatcacacctttgcattatatcctgggccacagagcaagactccgtatcaaaaaaaaaaaaaaaaaagctgttaggatttgtttgaattatagtacatgttgtagctataaatcagttgggagactgacatcttcaaaagactgaatatcccaatctataaatatggccctatccttttcaaactaatgcaggaacagaaaaccaaacactacatgttctcatgtataagtgagagacaaataatgagcacacatggatgcatagaggggaacaacagactctggggcctatgggaagatggagggtgggaagagggagaggagcagaaaaaataactagtgggtactgggcttaatacctgggtgatgaaataatctgtgcagcaaactcccatgacgagagtttaactatgtaacaaacctgcacatgtactcctgaacttcaaataaaagctagaatatgacctgcgtctcttttgcctaagacttctttaatgtttttctcttgttcttgttgtttttgtttttgttttgtttttgagacacagtcgcattctgttgcccaggctaaagtgcaatggcacgacctcggctcactgcaacctctgccttccgggttctaagaggttctcctgcctcagcctccccagtagctaagattacaggcacatgccaccatgcccagctacttttgtatttttagtagatacggggtttccccaagttggccacgctggactcgaattcctgacctcaggtgatccacctgcctcagcctcctaaagtgctgggattataggcgtgagtcaccatgcctggcctctttaatagctttcataaagatatataattttttccacttacacatcttttgttaaatttatttttaggcattttgtatcctttattgtaaccataaatggtatctttttaaaatttgtcttttctgtttgtggctgctagaagtacgaatgatttttatattttgtatcccacattcttgctgaatattcttatccatactttaaaaaaaaaaaaatttgagatggtctttcaccacgttgcccaggctggtctcgaactcctaagctcaagcaatcctcccacctcggactcccaaagtgctgggattacaggcatgagctactgcaccaggcctaaatattcttatccattctaataacttagctgtagattctctttgccttaatttctttaatagatataggataatttggattttgtaatttgtgtcttttgaggaaatttgtcagtttcatctagctgtcaagtttattgacttgaagttgtttataatattcttttatttttaatatctgtaggatttaattgatatcttctttttgttctcaaaattggacattatgtcttttttcctgacgagtcttgctggaagtcttgttttgtttctgctaggattttatcatgtagttgtgttgtattgtccatgagtttttggttttgtcatctagttactccgttggtgtgtgatgatgaggggagatttaaaagtgacgtcatcgtcattgctgccattttctagaaacctacgcttttatttttgaagtatatttcagtgggtagaattttatgttggcagatttttttcatttcaacatgaaaaatgtcattccgtgggtttctggcttctgtagtttctgatgaaaagtccttctcctacttattgttgtttctttgaaagtaatatgtctttttttcctctggcttcttttgaatgtctccttttatcttttttttagcaatttaatcacgactttttttctattcacctgcttaggatttgcagacattcctgtctgtgaattaatgtcttttatttgttttgagatttgtgggggaacattttctcttttttaaaatttccttttatttttatttttatttttttgttgttgttgttgttgttgttgttgttgttgttgttgttgttgttgagacagagtctcactctgtcacccaggctggagtgcagtggtgcgatcttggctcactgcaaacatcgccttctgggttcatgccattctcctgcctcagcctcccaaatagctgggactacaggcgcccgccaccacacccagctaattttttgtatttatggtagagacggggtttccctgtgttagccaggaagggttcgatcttctgaccttgtgatccacctgcctcggcctcccacagtgctgggattacaggcatgagccaccgtgcccggcctatttatttatgttttttgagacagagtctcacactgtcgtccagactggagtgcagtggtgcaatcttggctcactgcaaccttcgcctcccaggttcaagcaattctcctgcctcagcctccagagtagctggaactacaggcacccaccaccatgcccggataatttttgtatttttagtagaggtgctctctacctcctgttatggaggaggtagaaactggtctcagtctggtccagtctggtctcaaactcctgacctcaagtgatctgcccgcctcggcctcccaaagtgctgggattacaggtgtgaaccactgtacccaaccccattttctctttaaatagaggtactgttccacttcctttctggttctgggactctaattcctcacaagttagacctgtctggtatgttccacgtctcttgttaactttcctatatttcccatctttttctctctctctctaaccttcaatttcagtgttttctactaacctaacttccacttctttaatcctctcttctgttttgtctaatttgctgataaatccatctattgggtttttaatttctgttattttctcaattctatattctttttaatccttaaaaaataaagtccaggtatttggtgaaattctctatattttcttgttattttattttatttttttgagacagagtttcactcttgtagcccaggatggggtgcaatggtacgatctcagctcatgcaacctctgcctcttgggttcaagcaattctcccatctcagcctcccaagtagccgggactacaggtgtgcaccaccacacccggtcaatttttgtatttttggtagagatcgggttttaccatgttagccaagcttgtctcaaactcctgacttccagtgatctgcccacctcagcctcccaaagtgctgggattacaggtgtgagccactgcaccccaccaatattgactttttaagctatgtaatagattgacactcaccataagcctctgcccttgttctgcaggtcgtgaaggtgttgattgtcctgaccccacagtttctgtcccgtgacaaggaccagctgaccaaggagctgcagcagcatgtaaagtcagtgacagtctcatgcaagtccccaaggaaggtgagtgagggcagatggaaggggtctggtgcccctgaatagctcccagtgcttctgccccatgtctcatagggtggctgtgcaggggaaagcttaggcagtcacagtactggctttttcttctgcagaagaaggaatttggtttagggatgggatggcatagttgatttatttggatggaaattgctatcttgtgtaagaaacgcaaaaggaatcattgctggcatgttaacctaaagacaaaaatcagtcaagtgcccaaggatatttttaaaaaggttatttatagtcctgtacaaatttaaaaaaaaaatccaaatcagcagctttcaaactttttctaacatgattcataggaagaaatatgttctgttttgcaactcaaaatatatatacatacatataacaaacaaaaattagtagaatgatatttatctttataaatgcaatgcattctgatatgtttattttaattcaatgccttgtgcaacctacaaaaagtcaaacaatagagaaataaggttttcataaaattgaatataaccctgcaatttaaaataatgattcagttttttatatatttaacatatatctcaacacatattaagagaaaaaagcgtactgtgaaaaagtatacgtggtattatcctacccgtttgaaaataaagtgcaaagagatacatatgccaaaaagttaacacttccttctttgtaatactttgctgcagtgtctgagtatttacagtcaatacacattatgaagctacatggctaaccttgactgagtactcactgtgtgtgccagcccctaggctcaatgctttacatggatttttatttcattaaatcctctcctccacctgagatagcatagcaaaccattttacaaaaacaaaactgaggctcggagactcaaagtcaaatgcccgaggttgcagtcattaagaggcagggctgaaactgaaacctatgtgtgtctgacaacaagttcatgttctgagggtaggctagcctgcttcacagagcatgaaatagatggtgcatgcctgctacgatgggccagatatcactgtaggttcagtggacagccccagacaatggaaatttacaacactgaaggttcttatcctgctcatgcggcacgtccaccatggctctgctgggccttgtgcttcacatcccctcatccaccaacaggataaaaggagcagcctccacctgtcagcttctctaagagatggaggagagggtggccagtctcagtggctcccaactcttctgtcttgaagtgacacgcttcacttccactcacaggtcctgagtcacatcacacggctacatccaccttcaaagggtcaaggggagaacctgacacactcggtggattccattaaggccaccatatggtgtcagcctgtgtgggagactgtggaggggcagaggaggagggtagggaattggtaagtcactgtggatttcccttatacttaaccagatggagtttgtcccggagctgccgaaaactgtcactggaaagattaaacaaggtgaacttgagaaaaggagcttggtcagatgtaatcagcagtgaactcggaaccaactggcaccttcggcaaatccctggccacttcagtctccccactagggcggggtgatgatgagacattgagagggttgatttggaaaagcatcaggagggccacaattccaatgtttttcttttctttttctttcttttcttttttttttttttttttgagacagaacttcattcttgttgcccaggctggagtgcagtggcgtgatcctggctcactgcaacctccgcctcctgggttcaagcccttctcccatctcagcctcctgagtagctgggactgcaggtgcccgccaccacacccagctaatttttgtatttttagtagaaatagagtttcaccgtgttggccaggctggtcttgaactactgtcctcaggtgatccacccacctcagcatttcaaaatgctgggatttcaggcgtgagccaccgcacccggactgtttttgttattttaagttacattcagttactctgcttcctccaagtcctctctgtgtctttagaatttcccaggtgagtacacagattggagttccaggtaataaaatattaatttcgacaataccctgtgtgaagcatttgttctgggaatgaacctatgttaaatgccctccttctgtagttctccctaatccacaacctgaaatatgttgagaccagattctccctcctggcaccagtttctcagggtagccctaagcacccttcaatggccaagacacaggggtccaggaggtgtgccccatgtggcaccgggcacgtgcctgtgccctggagtgaggccccaggaaggccggggcagggcagatgtcctgggtggtcagccttggcttggggactatatttgcctgccagaccaccgctgcctcccccacccaatggtcctttgtgtcccccaatagtgcccatgtgcacatgtgccccagcctaaacctggcatgtgtgagtgagggcctcagcctctgggcacccagcactcctctagccctgcccctagctatcccctgtagtcacctacacatcagaccttccaagtggcccaggagctctgtccccgagcccttcctagaggacctcactcattcaccctcccagggcccaggctccctccagcccagaatcctcccccaacagacaatcttccttctttcagtataactctctccggcgacccagagtcctcctcacaaccctggcctggagtcctgtgacctgacccttcatgccatccctccttggggcctaagagggaccaccagggggccaccagaggctcagaaaagcaggggcagaaaaggccctgccgggggatgagagaagcacatgctgtccccttctcagccactcctggaggtcagcattggagaggcctctctgtgactgccaacttccgaggtgcacaaacccagaaactcacagggagataaacagataccgcaagcacagagacacaggggcacaaaaccaccccagcttcacctgggcactcaggagtatggcccacggacaggcacataaacacacacaccaggaggacacagatacacacacagaaccatgagacacagccccacagggctgactctacacacagtggacacccacgtgtgcgcacacgtgctcacatacacacacacacacacacacacacacacacactggcacagacccacaggcagagaatcagacatagaacacacacactacacaaaacataaacacacaaatacaaacacaatcagggacacccaaaggagaagcaaattcacacgcacacacctcaacacatacacaaagatacagaagccaggtatacacagacactctcaccgggggcacacatgccagagacacacacattacccaatcagaaacacaaacacagatttgcacaaccaacacacactcattcagaaagaaaggacacccaaatgcgtacaaagatagagaaaaacacagagccaccctgagacagctacacagagacataatcacagacacagacactcagatgcacagatgaatatatgcagatttacgcacccaaacatgcacacactcccagaccccagcccacagtacaaccagaggtggcactccagagggcaatcctgggaccagcggacagaacagacccaggcatgacctggccctcctgagctctcttggaagaaagtattttccaggtttcaaacccagggctggggatgtgccccttccagggcctacagaagggctgtgcctgggcccagagatgtcagagagaggccagggttgggtgactctgggaacaggagcacaaggttgcgcccagtaccctgtctgggtatgcttagagtgggggtgttatgtggtgcttaggagatctagaggtcaagagagaaagacagatgtgcccccagaaccatgccctgtgcctgagtgggctggcactctctgcgtcacaataatgctatgaggaacatgctatgatatatccccatcatcacagctgtgactgaccctcactcatagatggaggtgctgggctgggaacacagccacctggttggacctcatctgagcaggactgaccagggcaacactgggtcctgggcaaagcatctctgtggccgcatcttcctggggagtctccagacccaggttccccttctcctaatgtcccctccgataatcaagctcccccagatctgtttctctgcctggatacaccccctcccccaaccactctgaacctacatccccatctgtgtaaaggaacagtgatagtacttcaggatctcaggagatgatgcctgcgaagtgctatgcttagcacagtggcgacaagaggggctgctgttgtcatcatcactgcctttagtggccaaggacctcccaaggtgccagttctgggaagaaagatgcccctgggaggttacaatgctcaggtacacagctgctcagccacttcctgctgtcttctgatagtctttgcacacagccattagcactccagttgtacagaaggaatccagcccagcgttgcacagttggtcacccaaggtgcctcgtcctgccaagggcccctggccaagcctccaagggaccatgaggggcccgcctgcaagggaggttgactctggctttggggaggtgtttcctggttacatgaatgacttcttgtctgagggcccaaactctgttcgcttctccttcctttccctctctctgcttgggctataatcaaggtgaccccacaacacttcatggacatcacaggtctcccattcactttcaggctaatctgacttcaactccccttacttggtctttccttttacaaccaagacaactcaaatctgggggtctttatgcaggtgacagcacacaaatagaatttaattccattgttttgttgtccctgttttgttttgttttgcttgtttcttagggtttctttttatttatggtaaaggcattggctttccatttacaacggtgatagaatatttcctgtttacaataaccttgtgtcatcataaatgctgaagggatttaaagcagtggttttaggctgccagaggactgagtgagtttgggcacactctgcatcatcaggcagaagaaggcctttgggaagtttagctaaggacaaggccagcaaagctgatggccagttggggtgtctctcctggtcaccaggcccctgggtcctgcccacctgcttgacactccccatccatcactcctggtgctgccaagccctctgggtattgtggccaaatcctccaggagagaagctgatgaactttgtctcttgaaatacacagattccttggacatccctgggaggtcaatcatgagagtcaacttggttttctttccctcattagggttcaaagcttaaagtccatgctcacaggcagtaagatgacatagataagtgacatcattaccccggttcagatgttaaagtgtccaggtggattagggatgatttaagaccacacaaccttgtgccacaaagtggaattcccaggccagatggagacattttattgccgtattatgatcttatcattgagtgcaaaggcagtcttgtttcattttggattatttcttatgtttctgtcttacttataagggcgttggaatttccaagcatatgagaatttgtggttagctttttatcattgacttctagcataattatatgatcagaaacacgctatgtgatttgatttctctgaaatgattgagatttgcttgatgaacaaaataagtagggttaatttttgtaaatgtaccatgtgtgcttaaaatgaatgtatctccaacatttattcccaatatacaaggatgatggacggatggctacatggaagtgatggaaatggcttactattcggaccttctacatcctactggtgttttgttgcttagtacatgaattgctgagagggggctgtggagcctcccactctgcttgtctatgaggttcttcctgccttcctgccatcatttgtttctcatgttttgcagccaggactgaccatgaggaaccctgagaactcaagaaggaaggagcggcccagaagcaaggacaggaagctgggttttgtaaagcgtgtcttgtgcagatcactgatttacccaaaccagaaagggtcttaaagtgcttatgattgtccaaatataaagaaatgacaggtttctactttgaaagttttcaccctcacattataaaacctctccactacactcaggagagggtgctttatggagatgagaatattttttctgactggcatgcaccagattcttaggaagagatttggaagtctagtgatggggagcaaccactgcatccaggcagaatcaccccacatgaatgcctccaatcaaagaatctattgtttcttttgaggctatgaaggaggaaatgtgttgagaatctttgttggaattgtttcccctttacctggctgcattttcatagatcagttaaactctctttccctacctcacctttgaagacttggatacattttcctcattgcattttctactttcacccttgctcatggctatcgactgtcagaaccgaagcttttactggccccattggacctaatctaggtaggagcccactactgataacctacaaccagatagttgtcaggtgtgacaagagtgcccaagatgggggatgagttcctggtcaatgacaagatggcctttatccttcttgtacatttgatccacatctttaaccattgtgcccagagctcctactccttttcagacagaggctcctcagggacagtgcatccctcccaggagcccaggctgtactcacctccactgtgaggctgaagacaaaagtgctacagaggtcaaaggctgctttctaaagaggttttatttgcacaaaactgagtcttggtgtgtggattggtctgaattacattttgaatttattttctcccccaatacttgtaaatctagtgcttgtaaaatagtatgtgtgccttttgtggtggtggccatacattccagaacatttatattgttttccatgcagatttccaaggttgctactgattgctttaggtgcaatgctctaaaatatgaaggtgaactcttgttactggttatttggtgggctttttttgatggggaggatggagtctcgctctgtcgctaggctggagtgcagtggagccatctcggctcactgcaactttcgcctcccgggttcaagtgattctcctgcctcagtctccctagtagctgggactacaggtgtatgccatcatgctcagctaatttttgtatttttagtacagacggggtttcaccatgttggccaggatggtctcgatctattgacctcgtgatcctcccgcctcggcctcccaaagtgctgggattacaggcgtgagctactgtgcctggccggtgttgtatttttaactaaattcaattctcacagttttaatcataattccaaaaagactttgttatgcaaattctttttgactttgaaaatctgacatgacgtgcgctgtgtcagcagcaaagtgaacactgattttagaaacttgggctaaacaaccatctgtgattatttttgttggaatataacccaggtattattattatagcagctgtccactctcggttttgcatagatataaacatatctttatgtcatattttcatctataactttaagacttttttcttatatttttctcattcttccatcatacagtgtggactctttttttatatattacaaataatgtaacacaaatttctaaatatttatttatttattgttttgagacggagtttcctcttgttgcccaggctggagtgcagctgggtggtcttggctcaccacaacctgtgcctcctgggttcaagcgattcttcttcctcagcctcctcagcctcccaattagctgggattacaggcacctgccaccatacccagagaatttttgttttagtagagatggggtttctccatgttggccaggctggtcacaaactcttgacctcaggtaatccacctgcctcagcctcccaaagtgctgagattacaggcatgagccactgcacccaccctccaccttggttatttttaagcactaaaatttgatacttatttctgaatgaagtcatctcttaattgtatttttttacttatattctttaaattgcaaagattcatgtaattcaagaaagaagtgggatccagagagattcctttatcatgtgatacatgacaaatacattcaatgttatatttcaatctaaaaaataagtaaatgactttaaagataatcactttatacctagtttgtccaacccatgggtggcagagtgtattcaacccgggacagcttttctgaatgcagcccaacacaaatttctaaactttcttcaaacattctgagatttttttgtgattttttttcctcatcagttattgttagtgtactttatgtgtggcacaagacaattctccttctaatatagcccagggaagccaaaagactggacatgcctgcttcagaccaagaaaaaagacagcccacatttgcacgcctaaatacactaccatccatgcaagaaacatgagactggaaatttccaatctttcctgaagcagtggaattgcccggggatatctgaggggtgtggttacttcttggaggaggttaagggtttctaaggatgatcctttgtaactgaaatattgtaaatgtcattgagccttctcattatgtcaactagtagtattccatatcgtcaattttctgcctgggcattttcatcccgggcctgacttttttggaattccttggatgcttatcattattgttgtgtccctgggaatttacaaacttgccattttcttctgcaaaactagccttggtgtgagtacactaactttccctagaggtggacttgtaatcacaaataagaaattatttaaaacaatttgtggttctggacttcattatgaatattgggttttatttaaaaaatcaggaaatgatttattagcataagaattatgaaaaatctgccatttaaattatggcagattttttaaatttttttaaatttttaattcaacctatttaattaaaaaattaaataggtttgtgtttgtttaatagaatgtcaacagagcttttggtcaaaaatacgtttttttaagccctctgctctttatcaaaaactgaagtataaagtttcagcacttaaataagaaattctttctaaacttttctgctttatagttctattgtatgggtggaaggaaagcttccactctcctctctaaaggttcactgcagcaatgtactaacaacagacagcttaacaggagaaggaaaacatagaaccttattaacaggcataaacatgggagccagccaaaaaatgagactgcaagaagggccagatgattgatgcttaatgagcaccctcttctcagggaaaagggagatggagatgaaggcagggcagcaaatgattattaggggaaatgaaagagcccaaggaacaaacagctggcctgagacaaagttcctctgagatcatgaggaagaggcgacaaactgcaggaaggtcaagggcagaactgcactgtgtctcatgatgcagagaaagccccagagaatctcttggaactgccctccgaagaatcaatgaaaagtgtgtctgggcagagtaatgagtggtcatttcaaatggcatcattcaaagtacatgttctcggttgccactggagagggatcggtatgtcaaaagtctgtactggttaagaatgtggctgctaaattgtgccataatttggcttttgagcatttttgtccattgagtaaatcgagctctacgttttctcttgctgttcatgacagtaaaagtttgggtgtctaggggcttaaacatcttctgaacaatgatccaagaaaaaagtgctaacaccacaatgcttttttatcctcaagggaagggggagtatgttttatttttacaacctagataattacacatcatttggcactgcccttcaacatacgtagaaaacagaaaatatatgagttctgaagatatctaggcacattgaacagtctctactcaacttagtcctgaagagagaatttttgatgtgaactgggggaagttttttaatgtaccactttttaaatattccattaagaaaagttcagttgagctgtttgacttgaaccactttgcaccttctcatctttctccttgttatctactcctctatcccattatctcacaaaccaggacatcgtgagtgccatgaaatgttcatgcctcacggtttttctttgcttctcatttcttcatgtgtttgacatttctcctagctgcaaactgggccagctgctttccccataaaatctagcggtagctgtggggcgcatgcggttgctctttcatctttttagatcacccattgcttctatcgaaatcctagtacatgtttttttgggtttttttttctatcctatgtgaagaaatcagaaaaaaaagcattctacacagaactttaaagatgttatttcattgaatacatcaggaatttcagaggtatatgacgtacatttgcaacaggatttgcattgcatattagccaagaagagaacaaatatttcatgtcttagaagattcaactcatatgcggtctatatggaattctttgtgggaattcagtcattactgagaatgttttgtgttaggttccaaccagcctcagtgaagctggtgtcagggaagggaaagtgggctctgagtagagcatggatggaaaaaagatgctccacagaagatcaggaaggagcagggggtgaaatgttacaaattcttgaactcagagaactgaaggtagttgctttcctttcaacctgtgaaacattttaacctgcggtaaaatatgtataacgtgataattaccatcttaaccttgttgaaatgtacagttcagttgtgtgaaatatattcacatcattgttcaattattgttttctagatgtcttatctcaagtctgtcttacagtcacaaaatgtcaatgacagaacacggatttacaggggaaagcctgcaggtccaatagccgtagccaggaaggtatgctatctgtcagagtccccatagtgtggaaatgagtttgcccttttaagggaaagaacagcttctggccctcaggtttctccccgtctcctctctacaccctaaccaagggctcaggtccacttatatgcacacgaatagaaggattttatcctttgcaggaattaaaatggacccaaaatacctctttacattatggagatctacagaagctaaagtgcaagccaaagtccaaaaggtgatgatgaaggtcaacagtcattgcgaaatctctgggcaaagaaagactgccgaggaagagtaagatgttcactgacacaaacactgttgtatgaaccatgtgccaaccaaagtagacaactgcaatgtccccgagaatattttccacaatatttgtggcaaattcagtgggtgcaaaactgagcttgtccttcctgcttgattaatcttcgtgtttcctttcccttcctacattcttgattgtaatgttttaggggcaagcggaggtccaggtactggcattgttaaattcaatgcttgggtcacctcgggattcattttcacagtcttttagcttttggtcatatgacattgtatttttcctgccacatgactagtctttttggctaaatgtaagacactcgttaaaaatatttagcaatgaattgaggccgactagcatgttatcttgctgcagaaaagatgggagtctatttctggggaatgggcaggggtcctagcacacctagacaccctccataccatccgcaattgaggttatcagtgaggttcagtccctacaaaagtcagggtgtttcctgtccacctctattcctggcgtgtgactcttctgggtcccaaccaaagccagtggacttcagtaggggtcaccgtcactagcagaccctcagtctacttgttttccatctagtcctccacatggtgcaaaagctgctctgcttctttacatctcagttagtcccttctgaaattcagtgatgaaactgagggaaatgagccccaaatgtgaggctgaccttcgtcctgggttccttcttctccatcttggcctcatgtctctttattgccattttagcaatttggtgctttcagtcatgggttttagattctgccccatgtccccattgctctcatgggagatcagaagcttcacatgcactcatgtctactccagagcagaatgcttccttagcttccctccaggctcaggttttgtgtttctagttcccaagttcacagcaggagtagtgatgtcctcactggcttctcatttgcgttaaactgtgaactcctttagggtggggacaggaccctgctcccattgcatcctctgcacctcacaagacactccttgcttcaggccactccagacaccgtgtgctgaagggtgccctgggtggtcagaaacaagtgcatgaactttctctttgaagtgtttttgtccctgtttcctagagttcttggcattttacacgtctttctttctttctttttttttcatattaaacttgtagttttattcaggtttgattttaacaaatgtgtcggggagagagccctcagggaagggtaaagcccatgggggcagggccttcccagatgcctgaggagggggcaggtcccctcccctctcctcctcttccctccccatctaaaggggtttggggagagacacaggcaggcgagggggctggtccccagtctgttgggtggtgctcagggtaaagggctatgggcaacaggggaccagaccaaggatgagtggggagggcacaaggaccatttgccagaatccactgctttctgattccagattgaattaaaaaaaaaaaaaaaaaaaaactaaaccacaagcagcacccacccccttctcccccaccagggctgtagtgtgaggggagaagaggagggcagcttcaccaaggccacggctttgctcgctcctggccaagggagctaggtgaagggcaggggctccctgacagattgagggggtggggaaaaccaaaataaaacgtcaaataaattgtgtaggaggagtccagcctaggaccaggccagagccaggccaggctgggggagggggcctctgcaggttcggaggatcactgctgccaccactgccaccttgggagccagttattttgccatggccttgattgcaacagctgcctcctctgtcatggcagacagcaccgtgatcaggatctcttctccacagtcgtacttctgctcagtctccttgccaaggtctccctcagggagacgaaggtcctctggtacctccccgctgtcctggagcagtgataggtacccatcctggatgccaatcagctggaagtcattccttctgatgttggggacatccatattatgagttgacgggcagatatcttcatatttcttcccagtaaagatgtcaataccaaccagatggaccttggcgtggccgtgcttgccagtcttcgaagcagacatctccacgatcttacatggccagcctttgagcaccacaaagccattcttacgtaatgctgagcactgcattgggaaggtggctgaggcccctgcatctcctgtctcgaagtccaaatcatctgccattttaagaggcttcgattccaactggcgcaaacggcactgactcgaccccgtccgctcgccgcgagcccaaccgctgcctccgagcccgccgccgccgccgccgccgcctctacccaggcattttacacgtctttcatatgaaatcaagtatcaagtgagatttttagaatcagaaccatgaatcaagtagtgtgaggcaacacagcaaacccacctttttaggccatttccttttttctgccctcagtctctgtgaaacaaaccttgttaaagtctctggacaccagaggatggtttgcagttgtcacctattttcaggacataacaccctaactaaagagccattggatcatttccaattcagtagatgcacccagcactcagattggccttttctctcaaccaggatctttaaagtcgatgagaagagttccagtcctgaatcatggacatgtgcagtagtgaaccgcagggctaatgacagcatgtcctggaaggatctctctgaggctgattgtctgggttctggcatcagcctctgatggagaatcaggtctccctgtgggaggagtcagacgaggagtgatccgctgctccgtccttatgggtttagttgtgatgagctggtgaggtctggttttccacactgaactaaaatgagctttcgctatgtcaggcaaaagactgatcccagaagcacgcatagcgcatctcatagaagcttttaatagttcatatttactaaagagtaggaatacagagcgatgaagatgagctggaaacgacaggtgacttgccagcaggccagaatgtgctttttctttgtcccatggaaggtgttaattctctctccagttgtgaggatcagttggttcatttatgggaaggttgtcaggggacctttgaatcacggccttcagatgccacaaggaatcccacacaggccagtggatcacgtgcatgcatttctctcccttctcgactcaggaagctgagaatgaaagaacgtgaacgagaagaaaaggagaggcggctgtcagaggtggaagaaaccatgaaattggctctagaaaaaatacccatctgcaagtgggttcagaaaccgacaccagcctcttggggaagcgctggtggagtgttttgttttaaatctttgtacaatctttagacccagttaacacagaaatggaaacaaatggtcagaagcgatacctagagagagagacaattcacacaagagaacacacgtaccttaagatttactagtgttcaaaacatgtgaagtagccaaacatctcctgactgcaatgccagccagactgtgtggaaactcggttcataccagccgttctaggggtgatgcgagttgtcatcatccttaggaaagtgtgttgttgtaggatcaacccatccttcaaaaggactgtgcctgtttataagctcagctgtttctgccctgtgaaatatggcaaggatattaattccaggagaacagagctttatgataaaagatgcccaatgaagcatgaattagggacatactgaaaatgggtaaggaaattgtcaactcagaacccagcaggcattaagtaaaagaggaggaagcattacagcaacagttttgatcatactgtacttttatagccatgtgaaatacattttctatgtatagatagattgtgtaagggtacaattgtgaggacaacaggaacatggcagattatttaaaatcatactaaagatgatgctttgtctgatgaaagtgattctaaaccatagataaacgattcaagacagacaagagctgcagcagttggtagaggactcctacagatgagaggtaaggagccttccttcctgcagttgcaggatccttaaacgctcatcaagatgatgccactgcccctagaatctgtcaacatacattttctcatgtgttggctttttcagatcgccccttctgctgcaagaaaggcctcaacaactgggtaagtttgttcatttttcccttgcttttcggccaagtcgggacatggatgtatttttctccccacagctctgtgctcaagccttgcagagggagatggcagagaggaaggctgccggcaagcagcacaggtaggtgattgtgatggacaaattttaaggatgtttttgttttaagatgaagctttgactgtctagtaaagaaaacagtgttttaattcttctacaagtcaactctttcactgtcttcaagacaggaaatgatggaaaagcagggagtgctggagagacacatgagtcaggaggcagcccagggacagctagggctagagaaccctttctggagaggtaggagctctctgggaaggcacccacttaacttctgctccacaatccacacccctgcttctcctttctggggtgagggcttgggttgggtaattgttatgtttcctggaaacagttccaagcacttactaaagagaacagttatcccgctgggtggcaggaccgtttttctcacgtgccacagctgaatgactcttggctggtcccctgtgaatagcggagcacaggcccctccactgactgtggacatcattccaccctgatgtcttggttacttttaactgaggggatgagcctagaaggcaaatgggtcagctccccttccaaccttgagtcagtgggaaggctttattttttttattattatttgagaaaagtaacactaataacattttagaatgggagccataagtgctgatgagagcagaaattttctggctatgtcttcatggatcaatatttcttcttttcttaaagaatcagaagacatagccagaaaacagagaagacaaaggtaaatgctggagtcattttccctctgcctagttcaggacagttttgtcttttcctacagcgccctctcctggcctgtcctctgctctctgggttctgtggtgccttttctaactggacttttttgaaagcaaaatcttccccatgagctttcaggcttctccatttccagctggtcatctttggtggcacctccagaagccataaatgcttaagggccaagggctgcagggctgtcactgttctgtttccagaaataacatgagaggatgccattgaactccactgaggtaggtcttatggcccagtagaccctgactgatcccttttactcaagatggtgtgggatcccctttccaaaatatgtggggcttcctttttttttttttttgctgtgattttcttttctgctatgaggtaagtgattaaccttcagaatatccgccgtaatcccagaagtgaaaactcattgatccaacattaatatgtgctttgtgcaattttgaatgttctttggcaaagtcaattccataattcatcacagtcccatctctgttgttaactgtgttgagcaaaaacgcccccaccctcacccagtgttgcccttgatctaatattctaagtgtcagaggttccatattttaatagaaaatgtgccctggctgtgaggtagtggagagtgaacgtcactcattacctacagggacaattctcaatgaaggccttaaatgatgctcaattaagctggttctcatgtggcctctgtgtcttcgacagctgctgaatcctctgatcacacacgatgggacttgtacacttgaaatcaaacatatttttaaaacttctgttgttgagaattcccacctcatttttccatggacaaaattattctttatgtcatagtgcacttaaaatttggtattacctagaagttaaagaaatatgataaccgtgccaaactgctatctctaggtaagattattccgtcagaaaaccctctcccagttcccctgtagctcttcaggaatccccatctccccatagctctttgtgcccatggatggcgcttccaaagtagagaagaccgtttgtcaagaagggaagcagaagggggacgagagggtcttgcaggcagagctggaatcgacttccactctgcttcttgcaagctgtgtgatgctaggtgaaatttctccttcctctggagcctctattttcttagatttggagcagggtggtcacactgaccttgtagatttctgagaatcagagacagcacatgaaaagcctggaggccattctcttaagagtagctgtgactcatgtgtggacaatgggcttttcatgcttctgtttctctctgtttatctgatgcaaggaacatgctccggtgatgatggtgagggaggaattaggatagacatagacacccctgtgtcagaaacatgcttctttattactgggttatgactctgtcttcccagggacaggccccagcctgcgtacatttgcagacagagtggcgtgtggggatagcagtttgtccccacgacttttcttcactcccctgctgttggaaggactcagttgaagggacactttatggcattgatgctgccattttgaaacctggaggagggaaaggtgcaagggactatcacctgaggcataaggtgcagcttgtgttggttttggtgtttttgtgtccatcatattcatatatttcaaaacattttctcctcctgacttgtaggtcaatgtggctacagggaagcctcatcctttctcagaatggccctacttgcccgatgtcatggctggcccttcaggaccattgatgggctgccagccgcctcctctacctgggtgttgtctgggaactcaaacactccctccatctgaaggttttctgggacctcaacaaactcctccactggagagtcctctgggaattcaaccacctccactcgactgtcctctgggaactcagccacctcctgcactagagagtcccctgaaaacttaaccacctcctccactcgattgttctctggggccttatccagctcctgcagctgtcagtcctccaggacctcatccacctactgcagctgcctgtctttccggacctcatccaccacctgcggctgtcaatcctccaggacctcaatcacctgctgcacctgttggtcctccatgacctcattgacccacggcatgcatctgacctcatccacctcctgcagctgtcagtcctccgggacctcattcacctcctgcagctgtcggtcctccgggacctcatccacctctcgaagctggtggtcctccggaacctcatccacctcctgcagctggtggtcctccgggacctcatccaccttttgcagctgttggtcttccgggacctcattcacctcctgcagctgttggtcctctgggacttcatccacaccctgcagctgtaggtcttctgggacctcatccacctcctgcagctgttggtcctctgggacctcatccacctcctggagctgtaagtcttctgggacctcatcaacatgctacatgtgtctgtcttccgggacctcatccacctcctacagctcttggtcctcccagacctcatccacgtccagcatgtgtcttccctccaggacctcatccatcttttatagctgccttcctctaggacatcatttacctttttgttctgtgaggcctctgggacctccgactacatctccacttagtaacctctggatcctcagccaccccttctacctgggtggcgtctggcccctcaataaccaccttcacatgaatctcctcggttacttcaataatctccatttgtggtccctgggacttcagccacttcctccaccagggtctcctctagtacatctgccacctcctccacttggctggcctctgctatctgaactcctccaggacctcaaccagctcccctacccattgttgcctgtaggacctcgaccacgacctccacatgtactacttggtatatttatctgaacagtatgaactgagttgcaaaatggattcatctttccctttctgaatgaatagaaatgttacagattgtactgcagggctttgcactggctgaggatgtggtcactttgctcaagtttctgagagtacaagtcagttgcattatttcctcatcatgaccttggcagaaggtatcttctgtagatgaggaaagagttttttttcattttaaggggtgggggcagagtcttgctctgtcaccaaggctggggtgcaggggtgcactcctggctcactgcaacctccgtctccagggctcaggtgatccttccacctcagcctccagagtagctgggactacaggtgtgcaacaccatgcttggctatttttattttttaactttttgtagagaccacgtttcaccatgttgctcaggctggcctcaagctcctggagccatgccatctgcccactttggcctcccaaagtgctgagattacaagtgtgagccactgtgcccagccagaggttatttatagaagctagaaatacaagttttgcaggcttgtgtggaacctgggccatatggccagctctgtgagggatgagacccatccctggctggcagggcatcctgtgtgctgcagcagagagacccacactgaagggcacagagcttctgaccagcccaatggaaacacaagtgaagggacacagggtgcagaaggaggagacagaatctcctgggagtaaacaggaggctgtggaagagaaagctgaagcagggaggtgtgacatggggggttgttgaactcaggtagagctggaaggctgctcctagccaggcaagcagcgtgagcaggagcatggaggctgcggtgagggccacacagagctgccatgggagctcagataccacattgtgcacaggaaattaccaccccagcacttccttgttgccctacagcctttagtccattatcggtaggaagatgattctttccctgggtgcatgaaggctctagatcggggtgaatgaatgcctagaggtctgaaaattttaacttggttctgtcaggggaacctgtctccctgagttttcacggcctaaggagactaacaatgaggatgggtctggttcagtggagctgcggccttggccttcagaatgaggccaactctggctggaaactcaaggccaatcctgagctgctgtgacctactctgatctcctgcaccctctccttcccacccacaactctcagctttgcatctcccaaccttggcaggcaaaatgcttccccttccctgtgtctttgctgcctaagcccagacaccaactctcagtagagctcagagccccagctttctcagaaatgagctgggaatgatgcgattatgaggtcatggtgaggacagggagaccaagctcataaggaaggcatcttgcaaaatagctggtagatggtagagcctcacccctcccgctggttaaatgaaaatatttccactcagaagatcagcaaaaggtgttcattgaagttcatttaataaaccttagggtgtagcagctcaggctctgggatttccagtttctctttcaaaagataagggaaagcccctgtctccaagattagaattcagatccttacgagatgaagagatcctaaaaatgcatacacagttaaactctgagatttgtatctgtgatctgtggataattattctccatgacatacagacacagatatggccacacacagaagtattcagcaggggcacagatatttcatagaagacaaaatgtatattgggcaaaagaaggtcacctggaaataaaccgaaatctttttaccttacaggataattttgaaatttgaagagtctcctgggccatgatatcttggaaaagtctctaccatatttgatgctccatgtcccatgcttcctcctctctctctcatttccagtgtttccctttagaaacatttgcagtcctatctttctgggtgtccgcttcctggaggaccagttcacaccccagggtataccaggtgtgactcctcatacactattcaaactcaggcagatactgccttgctggacacagaagcagggttaccctttgggtagtgttgactgggaagggtccgaggggggcttctggggtgggggaatatcctgtatccagccacgggtggaggttgtgctcattcattctagaaagagtcactgtgctcctagtgactgccagtggtgccttgtgagcagatagacagtaatacatccccatgaggtggccaacttctgacagggaatagaagggggcccagcagtggctgtggagcctgtgaggggcctcgcagagactcagggtttgtcagagcccattccccactgagccagctgccctcggtagaaccaactccaggcagctctaagggaagttgagctgggtgtagacatttctccataagtcctgtgccccccaccatcttcctgtaatttttaaattgtgtgataggcagaggtcggtggtgagaggctcactgagcaggactggagaggagtagagaacgcaggggtgagttcagtcagaggatgagacaggcagagagaagagagagaagggatgagagagggaggggaaggacagagagaaggagaaagacaaggaggatagagagagaggggttgaaacagtgagagaaagagagaagggagagagagagaaggtggaaggtgaggagagagagagagagagatggagatgggaggatggagtcatggagagaagttgatttgggcccagggggagaaaaggaaagctggaagagacaaagacagaaggacccacagtgagaaccaagggagttggagggagggagatgtccagagagctggccagtgatccacacacggagggaaaggcagagaaaaaaagacagagaagagaggaatgaagacaggaaacaagagagatggagaggactgagacagggagaggaggctggagagaatcacagagaaacagcacaatagaggtagggaaagagttgttgaggacagggtcacagagagaaaggaaggacaaagagggaggcagagagaagcagagaaagagaaagcagggaacaaaagggtgagcctgcaggaggtggaggggggcagatggcctgggtgaggggacagcaaaggcaggtagtcctgggactcaggagccatgggagttcttgcactccaaggctgtgacctccttaaggcccagcgccatgaaagcccatcacatggggacacgcaggcctcccttgtggctgggttgctgtgtggagcctctgggtctgtccctgaagcaaggacttccaggggaaagggctgccctgtctcaggtttgcctcctctgtggggtggggatcccagcagcctccctcgctgcctggtccctgctgcatttcccatcctggccagctaggtggctgtcaagtcccatacctgggaaccaggctgagaccctttgtccagcctcatctgttctcacctggctccagattccagccacagctctggcaaacagtccacacatgctggctgtcaccagatccacataccccgggtggattcctgccctgttcccacaggacagccctcaaccaatggagacaggaacatggagttaaatgcttctccctttttcactgagagagagacatgcacagtctgatgcactttctttccttctttctttttctttctttctttttttttcttaagacagtatctcgctctgtcacccagggtggagtgcagtggtgtgatctcggctcactgccccctccgcctcctgggttcaagcaattctcccacctcagcctcccgagtagctgggattacaggcacccgctaccatgcccagctaatttttctatttttagtagagacggggtttcaccgtattggtcaggctggtctcagactcctgacctcgggtgatctgcctgcctcagcctcccaaggtgctggaattacaggcgtgagccaccgcgcctggccatgatgcactttctagatgctgtcctagagatcacactgggttaagcctcagttgccttcaatgtggtcatctctacagtatacccttagcttttttctcctcctttactttcccagaccctcactctgctccctggattcacttttcgaaatagtcctcctgctgcaaagtcctgggcacctgccctactttcagcattggaaggggggcccaggctaagaccatgaggccccactgtgggggcccacagccccgttcctccctctattcccaccacagttcctccctcctgtccctcagtgcttcctcgcctttccctccagcccaccgtgagatcccaggggacggagcagccccttctctgccccagtgcagggcttggccttagcacacggtcagtctgtgctggggtgaagtggtgaatgagtgagtggttgagtgataatgcatcatcagatctgtcttttccacatgtctctatctccacccagaaccagttttctcatccacaaataggcatatgaggttgggtgctcctaaaccctgcaaaattcagagctggcacagttgggaactgaccttccttgacctcacctcactttctgtatctataaaatggggtacctgcctctaagagtaaaaaggaggcctggcatagggaaagaaattctctcagctcgagcacccagatcatccatcttgctctcaaatacctaatacaggggaccatgttttctgctataattggtattggagctggtaccatttattaaaggcaattcagttatgaagcttcatttattaaaacagtgtagtaaatgtgtatgtatggacagacagataaatataatagaagagcaagtccagatgtagacagaaatccatacagaaatagagaatgggacaaaggaagcatctcaatgcagggtgctcagacacctggccaaacatctgaaaactaaaagaataaaattggctgggcacagtgactcacacctttaattccagcacttggagaggccgaggcaggtggattacctgaggtcaggagtttgagaccagcctggccaacatggtgaaaccccgtttctacttctaatttatgagtttaattagttcacattgataaggataacagaaatatttgggcttattgctgccatcttttgtgttatacatatacccttgggatggatattcccaagggtcatggactgtgctgtggaccacacactacgcaaggccatgagacagaagccaggcctggagggaccttcacaaaggacctttgggcctgctggagtgcaactatggcaagtgaccacagcggagacactggccactagccatgtctgctcccaccacaaagcctcatccaggtaacccagcatcactcttcttggggctgtgcccactgccctggctctgtctgcccatggccctgcaaacatccacaggacaaacaaggaatctgtatgaaatccctatcggcatccatcctggtcctaggaacaacaggagtgtagaaggaggaggattaagagcctcagctcatatgacctgtggaagataggacagggccagctggctcttccctatagggcccagtagcacacagctactcgaggacacatgttagggataaatatgaacctgggggccaggcgcggtggctcacacctataatcctagcattctgggaggctgaagcaggtggatcacctgaggtcaggggctcaagaccagcctggccaacatggcaaaatcctgtctgtactaaaaatacaaaaattagctgggcatggtagtgtgtgcctgtaatctcagctactcaggaggctgaggcaggagaatcacttgaatccaggaggcggaggttgcagtgagccgagattgcgtcactgcattccagcttgggtgacagagcaagactccatctcaaaaaaaaaaaaaaaaatgaaccagagaagggagcagtgcactaacgcagaaacccactactgagctggagggaagcaagaggccagcagagagctgatctacactttgatgtggctttgctgcatctgtcatgaggcctgcacccacctacaggtccactgtagtcaaggtagacaggtcagtcttaaacagagcattacagcgccctgggaggtgggagtctctgccacaggcgggacatgggctagtgtcctcaagcagaaaggctcttcaaggtgccatgcaaaggttggcatccaatcccacaaccctctcccaaaaagaggagcattttggccccccaaaaaactgtttctgggtcagtggagcctgatggcagccatccctctctctaccaccggaggaagagccagccacccttttccttccttcatcaaggtaaccagccattagcatccaagccaaggggcaggggaaatacaaagaacgcatattcacacaaaatttcactccatgcttaaccaggctctgctccttattgataacggtgaccctgcaatgggcctcagttcttacgtctgtaaaacaggcataaacagctagctcccagctgacagacactggttgcaggaacggcatgggataagcactcatgtgcattatcctttccgcctaagaaaagtactccccaaaaggctgtgcacagtggctcatgcctgtaatcccagcactttgggaggccgaggcgggcggatcacctgaagtcaggagttcgaaatcagcctggacaacatggcgaaaccccatctccactaaaaatacaaaaattagccaggcaaggtggcggggggtgcctgtaatcccagctactcggaggctgagacaggagaattgcttgaacccgggaggtggaggttgcagtgaaccgagattgcgtcactgaactccagcctgggcaacagagcgaaactctgtttcaaaaaaaaaacaaaaaaggtccccccgccccgaacaaaggagaaaggcagagcagtccctgagacaagatggggcgcaggcacaccaaggcccccggaaacctggtcagagtgtctgtcccaactggcctgccctgttcagagagatggaaagctggggagagtcttgatctctcgggggctctgaacggcctcctggtgagggatgggggtccctgagccctgaggcttattatcccccatgggaacacacagaactccctggaaccccctcctctgtccacagggaatgcgcgagccacctctgccctctactggctgaattaaaaactgcagccaattgaaggatgggcaaataaatgtcacacatcactctccctgttcattcattcctcattcacggagagctgctttgtatcaggtgccaagataggacgggaggcataattttaattctctgtgtctccaaggctgtatctgcatgaattctcctgtacttcccctgcttcccaaaggcctggtctgacaggaacagtcttcatcttttttcagggctgttctaactgtctcatcctcatttgtccacagaggccagctcagttctgtgcccctggagaaggctgatgtgaagcactatccattgctgagcacttgctaggtcctaggcactagctagaccctttctgtctaccatatccctcccaagctcactgcaaggcacggtccatcttcattcccttgtaacagctagggaaactggggctcagtgaggttccacagcttttcagaagtcgcatggcctgaagattctagagcctgcttcaaaccttgttccccctgaccccagaatctctgttcaggtttccctgaagatgccagagtgtgttcggtccacaatgaccacagttacggaccaggcccagcctggtcaggctcacctggcctttcacactgcaaggtggacctggtctgaacctcaggtcctaggactgctcactatatcaccctgaggatccagccttgctttttacctataaggtgtgcatatctatccctgggcaggcttgatcctggctcagcatggcatcccaacccctagtcctcaagctgcagacaccccagcgcttcgcccaggctgccctgaggcctttagcacacgcattgtacagatggtgatgacactggggcaggctttttaccccaaatgaagaatctgagggcccagtaagccagatgcgctggtgaagaggaatcccagcctgtaccaacctctcattgccttgaacagctaagctcagtccagctctggccaggacccttacagccagggggcagcagccctgctgggcccagaccaggagccacctaccctttagaatgtcagcacagtcaaaccattcttttacatttatggagactgacaactagcctccactgttgtcttatcactgagcaacacagaagcattggcagagaggaagtgttctgatatttcaaatgtttctggtggtcgaaatgctcccagataatagcatagttttggaaataatggactacatcataaaattaaaattaactccttctgttttctagaacttataatgagaataatttaaataaccattatttaccaaattttattcatatatgtataatactattgatgtatcatttgaggaaaagtaaagcacatataaaagaggcttttaaattaaaaacaaatataagggacttttaaaagtttgtgggaaaatgaaattaaaagacaagaataaaaaatataaactttatttctctcaagttctatcaaggtcaagacacttttgtaagtgatgatatcgtccattttgtccatctccaaagaactgaggatcctgggaatttaaccatgtcaaggcagtcttttttacattattaaatggagaaaaacgggtctcctttaaataatttcttaagattaggaaacaaaaagaagtcataaggagccaaatcaggactgtaaggtggatacctagtgatttcccattgaaactcgcaaaattgaccttgtttgatgagaggaatgagcaggatcattgtcatgatagagaactctctggtggagctttcttgggcatttttctcctaaagctgtgattctctcaaaacactcgtaataagcatatgtcactgttctttggccttccagaaagtcaacaagcaaaatgccttgagcatcactgaaaattgttgccctgacctttgctcttcacctgtctgcttttgctgtgactaggtcacctctgcttcttggtagccattgctctgattgtgctttgtcttcagcattgtactgggaaagccaagttccatctcctgttacaattctttgaagaaatgcttcaggatcttaatcccacttgtttaaaattttcatctaaatctcccctcctgtctgcagttgatctgtccatggtgttgggtctttttctgctgttcatcattgatcctcttcaattatggcatgaagaagatgaatatttttccttacaaattgatatggatggtctaccgctgtggacttcatcttccacataatcttgtggtttttttttgttgttgttttttttttgagatggagtcttgctctgtcacccagactggagtgcagtgacatgatctcagctcactgcaacctctgcttcacgggttcaagtgattctcctacctcagcctcccaagttgctgggattacaggtgcatgccaccatacccagctaattgttgtatttttagaagagatgaggtttcaccatgttggccaggctggtctcaaatctcttcctttcttaaaatgtgttttccatttgtgaactgctgatttttttggggggggggatgttgtccccataaacttttggtaaagcatccatgacttcaccattcttccacccaagcttcaccatgaatttaatgtttgtttttacttcaattttcacagaattcatgttgctctggtaggtgctcttatcaagccaatctctgatccttctcagtgcctcaaactagaccctattcagaaatattataacaagttagtgtgagtttattttggtgtaaaaaaaatttgaagtccatgcacagttttttcataatacacattttccatgaactttttgaagccccctcataaataattcaaaaatacatttgggaaaatttgagaaattatgtagggcctggtggtaattgggcatttggactggcaggatcatgtggtggctcaatgagaagccagaaagcaactctttcccattttctgggtgggggctccagcccctgagtggggataaggaggaaagcagcccttcatggaagctggctcaggagttcacccaggcttcctggagaaggggacagaagaggatgtctccttcccatgaactccacatttgagttcactggaaacataggctctgggaatggaggggaagagggcagaggaaaggctggcagctgaggtggggtataaagggaggggagtgtcagaggaggctgcgtccacgcctggaggtcagagggcaaatgcccccaatcacgctccatctgggttatcagctgcttgaggatccatgtccagaaactcggggaatcactgtgtccgttttccttgcctcgggactgtgcctcttgtctggagatgatgaggtttctttcagcctcccatgctctccaccaatgatcatgagtttccattcgagacacagaatctggctttgagaataagaaacagttccctccagcttttcttcaagagcctcaagtcaccttctgtaactccagatcacaagctggacccatccagggcagcaggcactcctgggctttgacctcctctgtctcgaggtgaaactcggtgagggttttacattccactgaactactgctggactgcagtggcacgtccctgatctctgcacagaatgtctttcatcccctggttaaacaagtctgtcaaaaacaagagaactttcaccacacgcataccatgacaccctcaccacctcccagggtgatccaggccgagcaaaacttgtgctcacctgcttctgcctcaagctccatggagtctgctgggttcaccaataaagcagctcacgcgaggctgaaggtcctcccccatttcccaggctgctgcagagcttcttgcagccaccatggccagctgggccgaaacactgagaccactgaccacggtctgcccagaaccacacccgtgcctggcaacagggcagactatcactggagaggcgtgggggcacagcgacaatagaatcacaccctccaccctgccctctgctgaaccccctcctgtggccccagagcactctccccatcctgagcgctccctgttctctctgcctggaaggcttcctccggctgctggcgtggagcacatatgtccacacaaaataactgcactccttaccgcaggccccaggggtccggggcgggcctggggcggcttggttctcagtggaaggagggaaggaatgccgcggaaggaaggaacaggtgagtgagtgagtgagtgagtgatgaggcccaaaaccatcccttgcccttcctcagaattcacactttcttgttctctcttgtcagttgcttccctaaggaaagcttaaaatccctgtccacaaaatacctgaaatatataattaaaaatatacatgtatatattatataattttaaatatttaacaaattgaaataaatgcaaatctatacactgataacatcaggtgatcatataacactaaaattcatcattttggactacaatgaaaatctcaaaaatgtgtttggaaagtacaaataatagagattattttctattaataacgtgtcaatgaaactagaaatgagtgaaaaattgaggaaaaacagccacataggaattttatgactcccccataagccattttggatcaaaaagccaccaaaaccaacattcagttcagaaagttaaaaatggaaaagaaacacaaggaaagcagagaaacagaaatgagatcaaaacgaattaaaatgtcttagaaactgtgaaggctttgatgcaaaaatccaaaaacaaaaaaaaatggcttctttcctttcttttaagagaggagcagaaatatacaattaaagatgagatcaaacagaaaaccaaagacatagaagagaactaagttcagagctgctttgtagagctcagtgctagaggtggagagagctggccatgcctgctgggaggggcggggcagcccaggaagtgggagtggggtcggcctggtgggggttgggaggtggggccctgaagctgctgctgggctacttttcgcccaagggtgaagatggaacagccctgggttgtctatacaggtcgcggcctccacctcatcccaccccacttactctcccgaggagggcatggataccatgccagggggcctgaagagggttgcagagccctggaggaggccagggccaggggctgccacgggaagtggaaggcagtggcccccactcctcccagagaggcttctgggaagcctgcacagagcctgggagtccagggctgcccctcctgctggagaatacactgttcagaactaaaggaacagcgggatcccaggacttcacagcccgggaacagtccctccagagcagcgggaaccaggcagtgtcctgggcagatctcgaggaagtggagggagatccagccggctcccactcttagctcccatcctgcccacggacacaatctgctctctgagtgggtggtcctccaaagtgtcttcccctgccagagcctgtttcctcctggtcacttgggattctgacagcctccgaggaaaggaattcctgtcctcttaggctgttgtgactggctccgcagttgcagtcttggcctgtgaaggagggggctcctcccagccaggccttgtgtcccagggcctttctgtgggcactcctgcaaacaccccagaggcagccacctcaaccctggggcaggagagaagccctgctttggtggcccagaatggatgcttccctaagatccacccaccccatcccccagtccattcagcacacgctgaccttgccctcctggggttctgtcccctaggcctgggagcaaagcgattgtctctatcttgatgccacctctgaccgcaaggtcaaactaggcagacatgacatttacatttcaagaagaaccatattttcatccagaaagtctgtaccaagttataccgatcaactgtgtttggggatatctatttccttatatctttgccagccctggattttaaaaacctttttctttttcttttttttttaaaattttttattatactttaagttatagggtacacgtgcacaacgtgcaggtttgttacatatgtatacatgggccatgttggtgtgttgcacccattaactcgtcatttacattaggtatatatcctaatgctatcgccccccaccccacaacagaccccggtgtgtgatgttccccttcctgtgtccaagtgttctcattgttcaattcccacctatgagtgagaacatgaggtgtttggttttttgtccttgtgatagtttgctgagaatgatggtttccagcttcatccatgtccctacagaggacatgaactcatcattttttatggctgcatagtattccatggtgtatatgtgccacattttcttaatccaatctatcgttgttgaacatttgggttggttccaagtctgctattgtgaatagtgctgcaataaacatacatgtgcatgtgtctttatagcagcatgatttataatcctatggatatattcccagtaatgggatggctgggtcaaatggtatttctagttctagatccctgaggaatcgccacactgtcttcaaatctttttatttatttcttttctttcctttcttttttttttctcgccatctgtttgccgaaatacaatgttgcattttttaaagtgtttattttttgaaacaagtacaattgagcaacctttgtttctcctgactttctccatttctttgattatatttacttattcctatccgtctagttttttccatttcctactggggcttgtattgctttcttattgagctgcggttcactccattcaaatattttctactctgtcacttatcttttacccttacttgtggctttttcctaatgcacaagaatttcatttttaagaaatcagatttggcaagtgttatggagtcaatgtttgtgtccccccaaattcagatgttgaaatcctaacctccaatgtgatatcaggaggtgggacctttcagaggcggggccctcataaatgggattggtgcccttatcacacacaccccagctctctcaccctctttctgccgtgtgaggatgcaatgagaagttggccatttgtacccagaagtgggacctctccagaaccaaccatgctggcacccagctctcaaacttccagctacgagaactgtgagaaacaaatttctgttatttataggccaccccgtttgttattttgttatagcagcctgaaaagactaagacagcaaattatttggcttctgatttccatcctgtcccataagagtcacatgaaagtgtctgacaaacctcccatattatagggactccactgttgaggttgtaagctctcctgttcccttgggttgatttcctctccccactgaattatttatctacccacattgttctgcatctgagccgacatgaaccaaactcagaacacagtccttgttccttctttctccaaacgttcctcatggaggcattatggtaggaaggaagaagacctcataggccagggaccagatgtctgtcacattgcctcttacactgtgcctgagtcatacttactctagggaatttgccacaggcataaagttattctaaagttcccaccccatgcctttcatcccagctaacccctgctgagctaattattttccccagactcaactctcatcccatattcctccatccactgccaactccaaagtacctcctatacttttcagaccaagctcccacctcctgagccccattcatacctcctatgtgtctgcccctcattggatattacatttctctgggacctctgacatgagatgtcttcctcattggcatgccacggttacttctagggttgaagcaactgaagtgcagagtgatcaattgtatggaggcagaaatttaaaaataataagtactgcattcattcactccaagaaaagtaaaagccaaggcccagaatgtggcaaggcaagggttaaaaagaaaagacaaacaagttttcctctgcctagcaagctcacttcaaggacagttataagataacgctgttcgagaagttgaaaccaaaggaataggctccagacaccccacctcaggagcaagggtgaaggaaaagaaaaaaaaaaggacaaatatctgtatttagccagttcttgttttttcttttgatgcagctagaaggccaccagctatgcaaggccacaagttatgccaagtcatcagttatgctatagattatgtgacctgtcattatatgattaactgcctttgttttgcttctgtagattgcctataaaaatcctgctcagtctttgttcaaggctcagctttttggatgtgaatccactgagccagtgcacaccttaaaataaataccctcctatattcacccatactggtctctctagtcctctgtgacctgtaacggtataaatccttatagtcacagtgctatgctcttaacaggtgctttaaaaaaacagctctgtggaatgattgacatttacatctctgagcagctgagcctggcaagacctaccaaagggcaagcaggatccttatatcttgcagaatatcttgctaaggagagctcaggaggcagaacagatggacacacctcaaattcattctctgatatgacccgtgctacaccaagcacctactctgtgccaagccctgcattgaaggcaagtatgagacagcagacaaggccagatgaccttggaaagccccaagtcctatgggggcaacaggtataaataaacaagcattgacatccataaagaattccaacctttgagagtaactgtgtgtgatgatgtgttcataattttgattgtggaaattattacacagtatatacatatagcaaatcacattatataccttgaatacatacaatttttatttgtcaattataccttaatgaagctggggaaaaaagctttcttatttgggttgatacatcatcttcagagtgtgagcaatagaattattgccataacattattattaataattaatgaaaatatttagttatttaaagaactacaacctttgagagcccggtaccagatggagacagcattgggtgtgatttatggaaggtgcttgggagcatcttcctgggagattgggagcatcatggagggtggcttgtcagctgagactgcagggatttggaggacccgcatgtgaagaaggaagggagagtgaatgggtagggaaggattcaagtgaaaggctccaaggaacatcatgttaaacactgaaaaagaaactagaaatggaatggagtagaaagagaggctatcaaggaaggggttttttggaaatacagaaatttcatctgaaacctgcagcgcaccccacacccatgacagaacgacaggtgcaaagaccctgagcaggaacgagcttggcctgctgggggaagccaaagagccaaggagtccggaatgtggggagtggggagcagagtccaggatgagggtagggggcaggcactgcacagacatgcagggcagtgcagcccagcacgcactctgaatgtcatgagatggcccaggggaggatgattgaggtgagggttggggtcatatttacgtttaaatgtgactctgccatttcccacatcatcaacctccatgtggctgaattcactggacagtcctgggcctcccatcatgtaacccatcaaaaccattttgcatagttggtggctcccctgctctagaaacagtcttcacctgacttccagggactctgtgctcctgagtttcctcaaactccactggccgctccctgccaacctcctttgctccgtccacatttccctaacactgtgacacttggctttgtggctcagaaggtggttctctatcttgctttcactaattattttgcatgttatacctagagtcctccccctaccccaggcaagtattccagtgtgtttcttaagtgtgtctatttgtatgcattcttgagaaacgtgcttttctctgtaatgtgtcatgtttcattgtattgcccacctagtgtcttctcagggtataggttctgtctcaaacaggactgtgaggccctttggcctcatcctcccctcccctccccgccacattctgggtcttcctggcaccccagatcagctttgtctgcccgtgagacacgggggccacacaggctttgcctcaggctgcaccaggacattccccagagctgagtcctgtccacacagcctgcttgccggaaaccatgcaggacccatcttcctcctgctctgatcaaaccccaagaaccacatcaccgggggccatggcagggatgaccttcaatgaaaaagaaccatttgcttattctcttcacaactgaacacgagtgaagggaaatgtgcatccacttaaaagttcggctcctctctccacagaccaatcccctccactccttcactttgttcaaattcagtcacttatccatactccagacatggcctgagcatgccctcatgccagtctcatgcagacaccatgcaggaagggcacaagataaggcataggcagcctaagggcagcaatgcgtaaggagagcacacagaactcagggaggagccagaggtggccactgcctttggtcctaaccctttttggggcctcagggccccgcatgtaaaaatgggcttcctaagaatatccaccttggtgagatgtggtgaggaatgaacatggcagtggtgtggcttaacatagctgctagtaacaagaaaaacctagtccatgagacatctgctccacgtggacaggatggggtgaccccgaggggaggatactaacttcccccggtggtgggggtgggcaaccagggaatgctatacagagcaggtgtcatgtctctggggttttgcagagaataactaagcatagggtagttgctccttgagtttttattcattgttttagcaggaactattaacaaataaaggctttagtttcatacaaacaaactgacaaaaaagatcttatttctctagagggtagggaaagtataaaattctgaattttcatgtcgagtgtgagccaagttagaggaacttggccacctgcaaaccactccctccctccatgggaaggaatctgaggcttcctaggtgaccaggagccgggcttcttttgttgccttaatttcctttcacctgagagaaaatgaaagccagggtctttgtgctccaggccaaggcccagatgctggctgcctgctccccagatgagacttcctgggctgcctctcccagcaccatgtaccctagagagaggccaagtccccagtgttcccctggggcccatggaggcccctgcctgagcctgtggtcctgggagctggggagaaggtagagatgctgctgtcagaggtccaggctaaggacaagtggggcaggtagggcaggtgctgctggccatggatggaaaggcaggcaagttccaagaccttagcaggccaaggactgctcaggccccttgggagcagacccgctccccagacagtcacctggcaaaggcagaatctcctcatgacgtctcagaagcttgtccaacaccagaaggcaagccccgcctatttaacatgaggccataggaccagcctccctggatccgaaagggccactcactccctccaaatgcactcagcctgcaggggatacaagggaccagggaaagagaaagacttgagggcctctgtctaaggggctggccatctgtgctaggacaagttgctgcttctgctccaggaagcccagataggactggactggacttagaccacttaccccagaagtccaaaaacccaatctctgcatgtctctgagtggtcagggggctgggattctaaagctgctggtcagtccctaactccagcctaccctgatgggccaggtaagccaactcaccctcagtcatcttctgggacacatgaagcaaacaaaatagccctgtggttctgtcttcacttttcagacaattgcccacggctcaacaagagctagtgggttaatcccctaatttccagtaacctcaggccttcaggacagagtccatggcctcatttctgaatctgctttgtcattgtttgagcctgttactggcatgagacaacggtgggggagggggtatgtcacaggctcctgagtcaaagctcctagttatacatctaggtctaaacacgtggctgtgggaccctgtggaagttatccagactctctgtgctttgctttcccccatctataaatgggatataaaaggtactacctcatcatgttgcagtgaagaaaaaacgagatcagttattagctgggtccctcgcacattacaggtgcttaggagacatcagtcctgctctaacccctgccacatgcctggcctgggtggggctttctggagaccctggctcagggcactggctgcctgtgaaaggggggtccaggagcccaggcccacaaggagccctgaggcctgttgagatgtgctgacctcacctggcacaggcaaggggagggagggggagctggtcagggtccagctgttgggggagacgagtgagggaattcactcttgacgggggtgccttttccactaaattaacattgccccagtctgagggagcagcaggagaacaccatgcccatccttacatcaagatccaacctccagcaccaggaagcccctgcctccagctggccatgatgatgacaggacaggctaaatgagagggacctggctttgccctgagggttggtgggtggggaaggcgatcagcagccaggcgtctggggaagaggagcatggccaccaggtgcctccagggtgagaccaggcccagctccccctggctctaaaatacaagcttcctgggaacctcccatgggaactcgcttcttccgaaatggccgtagcatgctgtcttctggtagatgggcttcttcaagtccaaatccctgcatgtccagcagaaaggaagggcattggaagatggaacaggagcagggtttctttctccatttcaaggacaggagggagcaacgaactgtaacacagccctcctcgcatggcactacgcctccccaccgcagttgcgcgcacccatcctatctgtgccataccctggtctcgttttatagccccacggatgcttagaggttcagggaccaggatctaactccagccttccggtgcttttctcctcccactccacttacctggcccaggccaatgttgacaccactaagctctagaaacggaatagacttgctgacttgattcccagccatttgagctatttggccttatattaataattattttcctaagatccccgcctgcctcccagttgctcagagatggccccactggagttggtgttgactgggccagcaggaacctggggcagcctcctttaacctgacaaccaggctttctgcactggggatgcactgtgctgtaccaagagctcacagaccctcccacttctgagaggcagaaacatcctcctttctgcctccctttcaggtgaggtgagcatctgggcaaggaaggagcaaggtcctgtgtaatagcagcgcatggcactttacctgacaatgacgcccggccggaggtcgaagttcttatgcaccacatccagcagctctcgctctgtcttctgagaggttccgtaggtgaagatggaaatggacagcggctcggccacaccaatggcataggaaaccttccagcaaggtgcagcgtcagggattgaagcctctgtgtgggccctgcccctttcagaagctttgcccttcttctgaagggaccagcggggaccacatgcctcttgccccacatgctcccctgcaattttcctgctatcttcaccgagggcagttcttctacacgcctctctccctgaagattctggttttccctcccctaggttttcagagccctggccacagtgcccaacacaatcacacaatcacaacctttggcaaagcatgcagctttcccaccgggccaacatcccctcactcagggcagaactgggcaggggtcctccactgcaacaggacggtggtgggtggagggggcttacctggacaagcactctccggcagagccctgctttcaccagagacttggccacccagcgggcagcatatgcagctgagcggtctaccttggtgtagtccttcccagagaaggccccaccaccatgagccccccagccgccataggtgtccacaataatcttacggccagtgacacccgcatccccctgcagagggagagaaatcaagataagaagcagagccagcccctagatgctggagggggctgaagtactgtgatggcagctgaactgcaactcaggaaggatgtcctggggctgcccacagacattttcctaagaccccttagcccagaactctggactccactcccagctcagtcactgacaacatattgaaaacaggtaacctgccaaagcttcattagcaagtgcagaaggtgggccaggggttctctggggtcacagccactccctaatgcctttgttactgagtccatcacaatggagagatccaactgcaggcaggaactgcactgtcataaatacaaccctggctggtgccacctagcaaatgccatgctgcccacttcccaagtgtcctctgggcaacaccagtcaatagtgatgtctttaaaagggtgggagttctatgttaaatgatttggggaagtctgcctgctctactcccccttttagagatccacagttcatactagtatgtctaggctttgagaagtcctgcaagaaaaaacaataagtgttacctccttctactctgtgtttctacactctacttgctactggaacccgggatggagctcaactctggcaaagcacacacggctgagggcccaggcagtgggcagcagcctcacagcagtgccctcaacctccacctcctcacacttgcagtacaagagagggggcagtggtgccctgtctaaaacaccctgtcccactctggtgcccacaacagccagaggcagcctgtggtgaagatctggaaacagccacccgggaacagctgtccacgtgcaaatgctgcagtggggaatgtgcaccagagcagggtgaggtgcagcagccgtgggtaaggtcgatggtcacttgagatggcaggagtgggagggcccagtggcgctaagtggaggaatcctagggacatatcccccatttcttgcacactgtcagacacatagcagacctccccagagagtgcactaaatgtacagaggccaaaattcaccgactttacatttagtccatggccagagtcagctgaccccctccaagctatctcttgaggttttcctgctctgagacataagcaaccccagtaacaaagacaaaccagggcttcgttcagagacaagaatgcacctggggacctccgatgacaaaccgcccactgggctgcaggtggtagacggtgtcttcgtccaggtacttggccggcaccacggccctgatgacttgctccttcagggccctgcgcatctcctccagcgtgatgtcttcgttgtgctgcacagagatgacgatggtgtggatgcgcacagggatgactgcgccattgtcctgcatgtactgaactgtcacctgtccatcagaagggtgggggagatactgtgaggctgaggctgagcgaacggcacatcgtggccagacacaggcacccaggaggtgggcagggctcccaggagccaagtggggcctcctgtcttcaaagggtgttgggggagttaatctgacacattcttacgttcaaaaaattgcctggtgctgtgggaggactgggtgtaaggcccagctattcccacatggggccacaattagcactgcttggagacttgagtttcctctcaacttctgacccactacatgtctcctcttctgtctcagaggcttccaggtgccagcaaatgtccccctggccaaagccctttcttgaccctctatagcccaggaggtatctctcctcctgccaatgatgcagataagaaagccaaggatccaaaatgtaaatgtcttggtcaagatcacacagtcggaagagctgggatctgacctggagctgcatgggctggtagacagggctcttccaagaagaaggttggatgccactcaagaccctgtgctggccacaggcccaatactgccgaaagcagcatggacccacaagagcagggctcagaggattttagggacatgtggtgcccgcaggggtgcagctctgccagatggccctgggagggacactggccagtgagtatgggactgctcccatcccagggcctggacagaaccacggggcagcaaacagtggctccctgggactgtgcctgcagcaaactctctacctccccaaggctactcaggtatccatcaaaccctggatctgtatcaaactcctactctgtgttctgcctggtctaaggagcaacaaggaaggtccagaagaagtaggagaaagagtcctggccatgtaagatctgcatgagatggcccgatgcacacagacatcgtgagctgagagaagtcctcaaatgccaggctgtgcacacacacggccctgggaaaggggctggaatctggggtaggggactcccaggaaaagaggcactgtctgtggcagactctaggactgggtctagtctgcatggagcctcgggagaaggtgcacagctggggagggtgctcaggccgtctccactgctcccctgggtgactccacccccacccggcagactccacgcagtggccttgcagaactgcagaatagggcagcagagcaaagggccctgaacacggcgcttatctcatcatgtcagcaagatgtggggaaaaacacaccatggaaaacacagctctgactaggtacaaaaatagccatccacactgccacccaggcctcactatcagcagcagggatttgttcaggtggaaagacccatcctgctcacagccagcagtccagctggatgaagacactacttcaaaaacagggtgcggagcaggggacctagacaagctgtgcctggcccagggcctctctcatggagggagtgtctagagcaagccaggctgttcgcaggccagctggcgaggggcctcctggagccccacagcaagtctgcaccccctgagactggagctggcccgcggtcctgcctgtggcagggaagtgaggctgactctggtatctgtattggcattttcgagacaatccttcaaaggaagggaacccctaaaagagcccatcccaccctcccttccttgctgacccctaaacctagaaaccttctatttcatatctaagcacaatgaacctgtttcagcaggtccagtaggtggtccctctgttcctctctcttgcacaaggaagagaaaaaacagtcagagccactggctacctcccctccctgttctaagatttccccttctgtgaatcttcaccctgcttctatatcgcagcaccattccagtccaggacaggacaggcaggccgacatcatgggcccctttctttgggtgccatcacgatctacatgttttagctctcctaactcacaacctccaagaacacccaaggaatgctgatggttcccatccccaccttggggggtcatgtggataacacaggaagtcccaaggaagggttccctttgggcataagcacacttccctgccccagtacagccagtatgcaacctctgccctgtgcatggtctgacacttgcacaagaaggaactccatctctgtacaactggagttgtacatggagccacacacagcacgctgagctataacaccatgggtgccagattccaagtgcaggacaagagaaggcgctggcgctgtctgctagtggccagggatggcatcccaaaagaggtagaactttgctggccactgaaggagaggtgaagaccagagagggagctcaggtaaagcaaagccctaagaaacaaggggacaatgagtgaaatgatgtcgattaagcaaagatggtgtggggcaggcagaggcaggtaaagttggaagaccataaaaggttgtgaatgccagaataataagtggatttcccccttccccttgtaggaagcccaaagttgtagaaaacactgaatagatgttagggaattaaaaatgaggcctaaaggggattagctggaatttccaagcagggagtacctttggaaggataggccactgatcctggcctggctgggatgatggcagccctggggaaggctgagctggagcgagaggggtgcttgatggggtaaactggggacatgggtaggtggagagagatggcgctgaacaggacgggggaagggcaggagggaggtggcagggtgctgcacacggcaggctctcagggcccatctgcttggagggtgatcagagaaacccacaggtgggagtatgtgaaggtgacaatggggtccacgagcatggacacagggagagaagttgtgcagtatgaagtgctgggaacttgggaatcatgagagggctcattggggttaagcagggaggggatacaggggtgaggtgccaggaggcctgcgtctccactaacacttgaatcacctcagccttcaaatataggccttgggttgatttcaacactgcagggagaagacaggtcagggcccatgggtttggagctggaaacaacagacgtaaagccttttcatgagaaacaaagatgagaaaaagggtcatgatgagacagacagcacagacagacagcacagacacagcacagacagcgcagacacagcacagacagacaacacagacacagcacagacacagcacagacagcctgttcaggacaaagaggcctgaaaatatggaagccagttaagtatgtttgtggcaggatttggggactcattagtcaatgtttactaatgagcaaacaaaaaaaacggaactattcttttcatttctctgtatttttgaaattttttataataaaatgttgtgggaagcatctctagctgaagatttttcacataaatagttcttttcaaaactgaccattctttgaatgcccagattgaatatttcgatcttaaaaatgacacaatcaagaatcaagaggatttgggggtattaaagcttctgtctagggctctcctggggtaattcagctgctcacctgagtcttagagtcaggccgcagccaggggaggaggccggagcgcctgaggtctgccatccgggcgttgagcttgtgagcaaggatgatggtgaggggcatgcactcctctgtctcgtcggtagcatagccgaacatcaaaccctgtggcgagagagcaggctgagcggcgcccaccctagaccaagaggaccgcagctctctccaagcctgaaatctccctggtgtgtccacgttgattgggtgcctcctccatggagctttccactggcatgtgcaggggaaggacgtcatccctgacccccaacactctaggagggggagacaagcccaaacccagtgtcagcaaccacagccatccacagcacggccgtgaagctggggttcccaactcgctcctggctatcgtgctaggacaagaatccacccctcagtgtgattaacccactgctcatgaactttcccagccagctcaacacacagctcccacatgcagtgccgagctacctgatctcctgcccccacatcctcctcatttctgtccagatggacgcactgggcaatatctggggattgctgctccaaagccaccagcacgttgcaagtcttgaagtcaaagcctaggcggaagcaaagtgagcctaagtggggaacaggtcagaaggagggggccacaaacttcccaatggatggctcggttcctgacatgccatttggtgtcagcgtgggggttccctaactagccagggtctgtctaggcccacagctgaggcccaggatgggagaggccccgcaccttcccaccctatcatgtagaactctttggccaaccaaaattctccgtggtgcattttactgtgctcaattagaccttggttaacacacacacacacatcctacagagacctgcagattaaaacaaggtgatgccaaggctcctctggctgaggacggtggctgactcataccctgcccctcaggctctcccacaggtgcctcccagaatctagtttgagcatcactgcactaggagaaaatcaagagcccttttgatactgtcactcagaagcccagctgtatgcctgacacaactattaaacatactgaacaaatacagtgtacatgaactatccagacagactccccaagccagggtcctctgaccctgagaggtacacagagtctggggcaaatggaaaagccacctgccctttcccatctacaaagctgaggcacagggtgcaggcctgctacacctagcacgcgaggcactggtttggggaagtctggactagcagtagctcagccctgggagtcccatgaggaaactgctatgcaccgagaccgtgcgcacctcctcacagctgtgctgggctcagtcacagggactgtgagaataagggactgaatacatggacgcccccaccacaaggtcaagcatagtgacacactcactctccaaacccccacagccatcttccttcccatctattctcctacccacacagcctgaaagggcttacagagaaaacacacagatccaagctgctgtttctgtacaagcttcaggtggggatctactgccaaggaataaaactgaagcttttcagtctgacacagcccttgctcctgggactccttgagccaacatgaactcaagtttagccatcagcatgatatacttttccatctccactaggtccctgcctagaacgttctacctccagctcccaccccacatgcccaaaccccacgtccactctcagtgcatgtccctggacctgcctgcagttcattagacacaatgccaggaacttaccccagggcacctcatgttgcatcatataccctgggagtatcaggtcacctttgccctttacaccctcctgtttcctaatgaatgtttttgaatgcacaaatcaatgaacagtctttaaagaactgccaaaagctgtcctgttctgcactgaacatttcagtttacctaatcactgtctgtctaaataatgaatctccccagggctcaaaaatcaagcaagggctccaaggaatttggaaaaacagaacttaggggaccaagaggggaggtacaggacttggaaaggacaatgagcccagcaacaccgcagccaggagcaacgaggagccactggcctgagaccctgctaaggctgttcctgtccactgagcacaggtaaatggacaagcttgggcacagggaacctcagccagctgagctcaactcagccacggctgggctctcgctcatttctccctttctagggaacattgcctcctggaaaatttccctcctgcctaatgcagaaaaagttttgcacttgaataaggtctaaatgtacataaacaaattggctttttttttggtagaacaggctccgtgtggtaacgcctcaggaagctgcagctctgggacaatgtgtttcctctgtgaataccctcatgtcccgaccaggagaattaactggttcttactgcttctcttcccactgagtctcaaaatcactgtcatgcactcaaccaatattaattgctcatgagtgctttgggctgcaccaggccatggctggactgaacctctgcgagtctgcaccatcataccatgagtgggctctctcacttacaaacgggggtccagcaccctgacccacaggatgctacacatcaccctagacaacgattatgtgacacaggcagaaatgaacacctttaaagtcatgcttctctctgtgcatcttgattacaggtgtatagctaggcaggatgacctggaagtgggtctttttgccatggcgtgaggtcatcacatctctcacagtgatttcagagaattagggaaagagctaacagagacccaaaatgaatttttctttaaaaattagaattgcctgaacatctaatgccagagaccaacgtggagactctaagaattggggccagagccctgcccaggaagccagcatggacaaagggcccctgaagctcctgcagaatgtgatcgcatacaggccctccgcacctggtgtctgctctctgggtcctttgctgccctccaggctgtgccgctgcctggcctgctcagtctcagatgttggaatctgcttcaaagttctgctagggcctgtgccccttccctgggtggtggccccacactatgtagcactggtgctaacctggaccagcctcgcctgctgtcagcaccagttctggactgagtcatcttgctccatgtctatgattgcaagtaggtttagtggaagcacaggagtcctcagcctagtggctgcttaccctgtgatctcacacagactgtttacccctctaggcctccatttcctcgtctgcataagtacataaatgattaagacaacacaagagactatcaccagtgcctggcagcgagcatgtccccaaaggagggcagccccctttattcagtgcatctttctcttccaaagcctttggcagcgccaagaaggcaaggcctaaaacaagcccaatcaacaacagatgggcatgtgctgggcccactgggcatagtcgcctgttggccatccttatgccagagtctttgacccctggaacctgacagacaagtgtaggagtgttttcctcctggtagtattgatgctcccatcgggctgaaaggcacgggtttgactcagcactggggtctctatcagcagagagcaacagggatttcagacccggaggcctgccctcacccttggctgagtcatcgtagccgatgtgcttgatggtgtccctcaccacccgctggtagtccaccatggccattgaggtgatctcaccacacagcagcaccatgccggtcttgcacactgtctctgaaagggagcggggagcgaggagagttagcagccaagtgccagcaaagggaagctcacattcccagacctctcacagtgcagacagaaaagacacaggaggggccttacgaggaatggattccagaaggaaaatagaaacgccaataaaaagaaaaaatcccagcaccaagcactgagcatcttccaatgctgtcttggaaagagtcagtcataagctgtgatcctggacaacttatttaacccctctaagtctctgttccctcatctatttaataaagctatttataagactgctatgtggattaaagggagatgatggttgtatgtagctgtcataaagaaggtagtccacacatgtgaccccccatcccccacattgctaaacctccactgcaggctttagggagtgggatctggaccaaaaaaaatcaaagcaggccaaccttctctccagatatttacaaagatataagggtagaatctaccttcagaggggcatgagtccctgtagtattcaatacagggctgaggatgcaaccagagagggaaggatgggtctgtgcagtggacaagacatgacaatgacagtaaggagagcaaggctctggtcttcacactggggcaccctaccccatggccttggccaggccctgatgcagagggtaccgtgatcctgtctctaaaatgaacaggctggacctgatcaccctggggcccctccagactccagagtccatgactctgccactgtgccacaggcttcaagccaggcaaaggttttcctgccaaacaacttatcccacaaataaaggtgaagatcttcagcctacatgagtcttcagacacaataaattatgcagatgggagccagggcttcagtactttagtttaacattaatgtctcttaggaaagccattgatttattgaaaaacaattggtgaagatgttgccttcctgttgctattaaatgggggacactaattattttaaaacctaaatcataccacaaactaggaaagaaaacaagagaagaagccaggtatctgtgcagccaacaaaggctcctacaatgaggatgcagcttataaccatctaggcagctacctgtgtttcaagctcttgcatcccgtctggaagattcacctaagaactttgaaagacctccttgttcccaatgagatcaagcatcagaaaggccatgtgctggtccaaccctctgctatttatggttgctatgacatttaacgttagattcttgctaaaaataattatctatttgtttcatggttagaaatgtttttcctccctgttactacacaggggaggtctcataattgagaaatctactgcagagcagaggacatggattttggaactgaggagtatggctcgtttgtcttatacccatgattaatttctcagtctagcccacttaggtctccagcagggagggatcgggtgtttcttaccacaggccaccttggcattggggtcttgcttgagatgggcatccagcactgcatcactgatctggtcacagatcttatctggacaagagcaaatatgggtcagaatcacaaaaatattcgggataacaaattgaaatcttaaaataattagatatcgacttttcagtttacatatcaacttatctaccagagggaaaacactttttttaagtataagaaattagaaatactttgaaatttttatttatttccattcctgcctaattttggatgacacgtattatataaagtcatagaatgccctaaaaaagaaataccttttttttttttttgagatggagtgtcagtctatcacccaggctggagtgcagtggtgtgatctcggttcactgcaatctccacctcccgggttcaagcaatcctcccacctcagcctcccaggtagctaggattacaggcttgtgctaccacgcctggctaatttgttttgtattttcagtagagatggcgtttcaccatgttggccaggctggtcttgaactcctggtctcaagtgatccgcccacctcagcctctgaaagtgctgggattacaggtgttagccactgcgcccggtcaaaatcagctcttctaggagtctaacgcaactcacacataaacaaacacacacgcattcttctaaataaaaaatctctcattcctcatcatgttccctttaattctaacatctacaaaagtcctgaaaatgaacttaaaaatagttaagaagtcaattttacctctttgccaagaggtaaaatcagacggctcaaacagctgcattgcatggcaggttccacaagatgcaatgcaccgtatataaaacaccacacccaagtacatgactccacccataagaattctacaagataacccctatacatcattgttgttttgcagaatacttccataagcagctctcagatctcccacatggtcactcagcctcccgaaagccaggtgtccttagagctgggcttgacctcttcaattactgtaggactgacaagggttcaacatgagctggaatttgattttattcttccactatttgccttaaagactctgcagggtctaaaatgtaaagcactaaatggtgcttgtaggaaaatctactcttgctttggggttatgcaaactgtcaatatctacaaattaagaaataaaagtgatctctatctacatatattatagctcattcagtgttaaaaatacccacagtctgctcttaatagagtaatatgtttttgttaagaatccagatccagaatcaagcagtttggctctcaaaagcagatgttaaattctgtaattaaagatattcattaattccttaatctttcctttagaaactactgctaaacatatgtttgaggttgtgttttgtttgtttgtttgtttgtttaatctagcctcctgccagtggcagaccctggtagtacctttaggtttgtctgagcccttagcctctacacacttctaccactgaaggcctctcgctgataaaatatcctaaaataaatacatgctggccaccttaggcttacccatcagagttcctagaagcttgctgactgatcattgattgtgaatgtctctgcctgtgcagacacagctcacaggctcccactctgcctagggaaatccaacaggagaaggaacaaagctggagtccagcaggggcttccagatagcaccacacacaagacaatgcccaaggaggttgtttctgaattgtttttgtttttgttttggctttcaaaatttttatcaatatcacttagtaggcttaagatagccaatagttgtttttttggaaaaccagagaagaaaacctttatctttctagcagagaggaattcagcaatggaatgacaagcagaaagtcacctagcctccatggaaactgacttacctggacaattacaatggcaagtacaagggacgattagacaaattgattggctgtcattaagtatacaaaacaatcaattgattggctggcacgttcattctcagtcctctgagcacattgctgctgcgcacaatggaccattcttgggaccactagccgctgcatgccaaaaaacccacttcctccgggtggagtgaatctttctcctaacctatacatgaggctcatagccatggagctgatcagaatgtgtcagaaatcagcaatgtatctgagattgaaaatacagtaaacctagatactttatacagttatgcacaatgaaagaggctatttacattgaactgagctaagtcacataaaaaactcaattcaattcaaggtttttcaacagctgcactattaacattttgggccagataattcttgagaggctgtcctgtgcactgtaggatgcttagcagtgtgcctgacctctactcaatacatggcagtagcaccttacccccacctcctatagttgtgataactgcaaatgtctccagacagtacaaaatgctcttgggggttgtggggcaaaactgccaccagtcaaaaaccactggctaaagtatatggaaggagtagtgcactgaggtgtccaaagccaagttacaaggtaggaaagataaatatctttgaggaagaacaagagcaaggaagatggaaaaaggcagacttggcaataagttagcaaacactcgaatgaattttgaagagggacttaactatagaagtctgtacatctatcccccaggggtctccaagagcagtggttctcaccccagagcatcagcatctcctgggaacttgtcaaaaatgcaaattctcgagcctctcccaagacctactgaatcagaaactctggagggtggggcccagccctctgttgtcttgacaagccctctgggggattctgaagctccctgaagtttgagaaccactgtcctacacttgaggctctgaatgtcctggtcctagttctcaccgtcatcaaggaagcttctctcacttccgcacatcacagtctacctacttttcagggaccaaaatcaatgcctaaattttcttcctgtttagaaggtcttctattctgctcttagagaacgttactgagtccccagcacctagaggtctaccccagcagtgaccagggtgcaggctttcatgcctaagttgcacatgcttcacatgcaaaatttagtcacccatggtcttgtttcaggaacattccctgttgacttaaattggccatggataatagattaaagctttcctaaaaaaaaaatacatataaaaagttaagacctgatcatatattttgcatgtgtcatactcttagccagccagctgctactccctgtcttggacccactgtgctggcgtgctggtggtgggccacagcacggcttcatcaggagggactgttttatgaaactactccatgctgtttctctagagatcccttctggtaactcacacacattgctctgaagagctctggtaaaagtgactcctacaggtacgaagttacagtcagataggaggaatgagctctggcattccattgcgcagtagggtgactgaagggctagaagagggaattttgaatgttttcaccacaaagaagtagtcaatgtctgtggcaatgggtatgcccattatcctaatttgatcattaaatgttatactcatggatcaaaacaacacacggtaccccataaatatgcacaattattatgtgtcaaattaaaaccatttgtaagtgactccctcagtataggcttggaatgatcgttttccagtcagtccaagacagcctacttacccgggtgtccctctcccacagactccgatgtgaacatgaagactccttcacttagagagtggtcacacaagccatccaccggtccattcatcttctcacacttctccactcacgcttctttcagtgaacaattttgaggctgtgactttgcctgagtttttttttcttcttcttcttcttctttcaacccaacaggcttgtctttggcagagccacggggatcacttctgcctaactgcctgtgagcacgtgagaacaggcgaggactgctgagaagggagggagtggatggaacacgggatgtgtccctccctccagcttgccacagcttgctcctgagcgactcctatatatggaaaagcgaaagtgcctgaaaaatcatgtgagaaaattggaggagtccatttcctaagaggggggtcttcttacctggaggaatttcaattcttatccctgactttccaaactctaagcacctggtcaaggtaaggtaaagaaggctgtatagttctgcagaattgaagctcctttgggactctccttcagctcttagccaatcttggtagtgctccagagttcacaacccaccttggagagcaggggtctgtgatcacccagagatacaagcaggcaacaagaaactctttctcagagatatggtttaggctaagattgcaacagtgcctttgctgttgggtgtcccctcctcccctgcgtctcatctggattggtctcttcccattctatcttctcagggagagcaggagcacgcacctgtattctgagccagctgtgatgttacacaacagattcattttagaggaaaagctttgagtccacgtgtttctgctaacagaaaccacctaacctgtcaacttctctaaaaggctggcaggcattttaacaagcaagatctttaaaaagtatctatctggggaggttacagagaacaatgtgtgtgtgtgtgtgtgtgtgtgtgtgttttttttagaaaaaaatgcttttgagaaatggattcattacagggaaattatcaaagtccagtttcccaaagcttccggattataaacatctacatattcagttctatacatgtaataaacatcgtgttcacataactcttgcattattttttgctttgaccaaaaaaagtagtaaacaggattatatctttagttcatgtactaaatgacagcgtctcacactctcagatccagctgcatcctcagacccaaggaacaatggggaattgagaccacagaaaatgaggatgggtggagaaaccagttcccactagaatgcaataaaaagtaatcaaccataaccttgtgcatcaaagcttggactgtgggaagcaaaagttaggaagcaatagcctcacctaacaattctggtgaccaaacccccctctgagtttattatcaagcatttggaaaaattttttctggcacacattctggtgctccaaagcttgagttttgctaactgatgaccaaacatcatcccttcagggaattaaagcagtattaaggtgacctcttctggaataaagtaagggatgttacatatgcatagccaatcaacggcatttaacaaggagtgaactgaagtgcttaggcacaagactgttgaaagttcagagaggaaaaggccactgggaagggatggacaaacgaggaatcaaatagggactttagacaacatcgccttgtcattgccagcacacaggactcctctgtttgcacttaagctatttcaacattgctggcccttagtaaatttcttctgggtacattagttttaaacctagaggcaatatgagctaatgtttaatttgaactgtagaactaggtgaccttagcagttaaaattgtatgataacaattatggtccaaatttgatttaagaacaagatgatgtgtaagtagcaggtactcttcaaggttcctagagttatcaggaagacagaaaacaaagcagtagctgccttctgaattccataagtaacagcaccatggggtggaaggcgtcagggtggggagacgatctgttacacagatatgtgtgcagggggctttggcagcctggatgccaattgagggtgtgagggagggatctgagaggcacctcgttaaaaactcatctcaagtatgagtttcatttaagaccccaactaaatactaggatgccttatattcttctagcaagtaaatgttaagaagcagtacacggagcatggtggatggaagtgcaggcttctggactagggtccaacttttgcctgtaacctcccatgcagcatggagaaggcttcctaacctttctaatctgttgtttcttctgctgtaaagcgggttaaataattacctacctcctagtgttattttgagaactaaatgaggtcatttaggtatgatgagtattggacaaagtgctagcacacaatacaaatttaataaatatcagctaatattattaagcagtctatttacatacatatgattttcctctgaacaaaaatagattatggtatgtatacatatgtatgtatatgtgaatatacacatatacacatataattttgcatctcgcttttttccccccacaatatatcgtggccctctgttcacatctctaaatacagataggccttatgtttttttattggggggggatgaagtctcactctgtcacccaggctggagtgcaatggcatgatctcagctcactgcaacctccgcctcccgggttcaagtgattctcctgcctcggcctcctgagtagctgggattagaggtgcacgccaccacactcagctaatttttgtatttttagtagagacagggtttcaccatgttggtcaggctggtctcgaactcctgacctcgtgatccgcctgcctcagcttcccaaagtgctgggattacaggcgtgaaccactgcacccagcaggccttattttttaatacttgaatagtatcccacaataaggatgtaccataaattattaaaccattcattcctcagtggttaaatattttcaacttctccagttatttcacatcactataatgctgcagtgaaggtccttattcatcagtatgtttctgaaaaagataataatggaaggctctggcagtgcagaactagccaaaagatttcacttttgcaatgaattttacctgataaaagaagtagcaattcaaccaagagttaaaattgtagtttcaatctacccccttcagaaagaattggcagatcttagcaaagatgtaattactttgagagttgaacctacaaggacttcatggccctaatttaccatcataaacacaaattaagtcctcccttacgcacagcctgttcccatctctcttatgcttgaattgtcccaatggccactccaagccccaaactccacactggactgattacctaagtccaatgtgtcaaaggcacacagttgatctcactgacatgcagcagccttgaactctgaagcttcactgacaagcctctggagaaacttggctttcaaaataaatctctctttcagtcagatttaccccgatgaatctctgaatataaaacatccagtggaagactgtttccaataagcagtgcctgtaagtcccactgagcagtttagtgatggagcttcgagggcacctgaccctaggcagcaccacggggccgcaggggtggtggggaggccctgccagatggtaccctttgctggctctgcactgccatgcctgatggggaggccacagggaggaccctaggtgcagaggtggggggtgcaggtgttgtctaagtgcaaacatttctaaactttggctagaagctcctctgacttaaacggctaaataatgaaatattttcaagtggatatactgcttttgcctcattaatttaagcacaaacttttcctgtagatgccactctggagcatgaataagttacttatgaaagaaagatgaaattgattcagattgtacatttagatatcaaaataacaaacagaactttgataaaataaatgtattatgcttttcccttgttaatccgtcttttgttataagagcatcagctgtgacccttatgatgggtaaggaaagcataacacctttccacccctacacacccatatacaactcctattctgaaaaggaagaaagacatgttgaaagacttaatgcaaaaagcaggactcaagctagggcccaaaggaattacagaacttagaaaggcaacaggaagacagagagggtctggaagggaaaacttccccagccacagctggtgaagttagtgcagaagaacattgccccaaccccacctggggagggtgggagcagataactgggcagggaggtaatggctgagaagccaggcactctaagcagtaagtagtcctctagaaaagcagtgaaatgggtttcattctgacagtgtagagtgcaagttagatttgagaaggaagactccaaaatcagagagaagagttaagactcttgccttgattgaggaataacctaatgaagaacagaccctaagatgttcatgcaatataatgaaatccagctgtgcattgtcatttttcaaaactgtattgtttttcttagtagaatcacttcgtcccccgactttagaggcttgaaatcctgggaggcggtttcaattcctgattgtctatcatcatatccaagtttccatagtctgttaattctttttcaaaagtgccttggaattctcccctccatttctgtgttcacagatagtcacctctgcacccatccttatcatctcacatttgagtcaggcatcagctggggccaacttcccacaccaacataccctttgggggttggcaccatgttgcacataccaggagttttaaaactacctgatgattcatacctagaaagatgagcatcccagctgggcacagtggctcacacctataattccaacactttgggaggccaaggcgggttgattacctgaggtcaggagtttgagactagcctggccaacagggtaaaatctcgtctccactaaaaatacaaaaattagccaggcatggtggcgggcacctataatccccgctactcgggaggctgaggcaggagaatcacttgaactggggaggcggaggttgcggtgatccgagatcacaccactgcactccagcctgagcaacagagtgagactccatctcaaaaaaaaaaaaaaaaaaacagaaagaagaaagatgagcatcccttaggctaactcaccctgaattaaggcatgcaaacaatatttacatagtgaaggccaaatcaatctccccgaaatacttccactccagaatatcctttatcaggaaaaacatgaagcacagtatcacatacaaagacagggataaactgtggctatatattattcagcttttgaaaaaggacaaataataatatgcaatgtaatagcctattcataaagataaaaacaatttttaaaattttaggaatatataaagatgcaatgagatacaaaaaggaaaagaaaggagtgatgttactgaaaatggtggagaattccaggactccatttctccacaaaatccatgaataaagcaaaattatctaaatcaacttttgtagaactctggaatccagtcaagaacttacaagaagctcaataaagaaagaagctgctaaattgccataaaagagtgctatggtatttaaattgcccgcctaccatatcccactctccagagcaatatgactgtgaagacggcaacccataccctgagttcaggttgctaatgccacaaggaaaaacatgaaccttattctcaaagaactgtggttgtaggtttcaagcggcctgtctggtagctccctgaaggattggtgcaagggcttgcctttgttttgcccaactcacagcattcctgggactggagcaacttcccaagtagtggcttgctgaaagcatttgaaggcaaaagtgttggctgcagcagactagggcaatgaatgacactcagggcaagcaataaacagaccaaacctagggaagaagggcttgggaaaggagatgcctaggggaataagggattttaaaagctaccatctatgctgggggatcaaggagatgaggcacacgcccagggttggacacatgctctgaaaaggcctgagaagaccttaagcactcacctctggtgaattttcaggttttatgcaaataggaagtgaaggccgtgaaccccaaaaatctgagacaggtctcagttaatttagaaatttaatttgccaaggttgaggacgtgtgcccatgatacggcctcaggaggtcttgacaacatgtgtccaagatggtaggggcacagcttcttttttcacattttagggagacatgagacatcaatcaatatgtgttggatgtacattggttcagtcaggaaaggtgggacaactcgaagtggggagggggcttccaggtcataggtagataagggacaaattgttgcattcttttgagtttctgattagcttctccaaatgaggcaatcaaatatgcatttatctcagtgagcagaggggtgactttgaatagaatgggaggcagatttgccctaagcagttcccagcttgagtttcccctttagcttagtgatttgggggccccaagatttattttcctttcacaaggctaaggcagaattgtaaatggccttacagtcaagcaccaaagagtaacctaacccagaggcaacctgcaaagactaggaggatatggtggctcctatctttttcttttattggcctaagtcatttaatgaaactccaacactagctgaccactaagctaatggaacatagactttattgaccacatacaacatgcagactttataaaaatagttcagaaaactaataacaaaacaaatatcaataacccacaataagctacagcaatactggggcagggggaatctgatttccagtgtcactacattataatgttaaaaatgtccagttaacaacaaaaagttatgagacatgcaaaaacaaaaaaaaagaagaaagtttggccattcacggggaaaaaataaactagtagaagcctccctgagaaagcctaggcattggatatattagaaaaagacctaattagccaggcatggtggctcgtacctgtagtcccagctacttaggaggctgaggcaggagaatcacttcagcccaggaggcagagttgcaataagtcaagatggcgccactgcattccagcctgggtgactgaaggagggcctgtctcaaaaaaaaaaaaaaaaaaaaaaaagactttaagtgaactatcttaaatatgctaaaagtctaaaagaacccataggaaaagaactcatgaaaatcagggaacaatgtctcatcaaatagtaaatattaataaagtgattaaaaattatttttaaaaagaaccaaatagaaattttggagataaaaagtataatagaaaggcaatttcattagaggtgttcaccaacagatttggtcagacagaagaaagtatcagtattatatgaagacaggcaaattaagattatttcatctgaggaataaaaacaaaaaaagtgaaaaagatagatatgcagagcctacgagaccagtaggacaataccaactataccaacacatgcataatgagattccaagagggacaggagagggagaaagcagaaagaatttttgaagaaataatagccaaaacttcccaaatttgatgaaagacacgaatctctacatacaagaataacaacaaaatctaagaaggatgaattttaagacacatcaagacacactatagtaaaattgctgaaagccaaagaaaagagaaaatctcgaaagcagaaagagagaagaatctaatcacatataacagtagtaacagtcaaagaacaggacaattacagtcaaaagtattaacagccaatttttcttcagaaatcatgcaggctagaaggcagtaagataaaatatttaaagtccgggggggcgggaaacggtcaagtatgaattctgtatctggcaaaacgatccccccaaaataaagaaaaaattaagatattcccagataaataaaaactgagaaagtctttcaccagtagacatgcactacaaggcatgttaatagagaggccatcaggatgaaaggacactataccataacttaagccatattttttaaacgatcacacctcttgctccagccagagcttggggttaggtcttcactgccatgtgtcctctgtttcgggaggcctaggtgattctgccacagcctccatcattctgtgacctgctgttattggaagatttatagctaagactccaggacatccctgactctgagacatgggactcaatattcagagacgtggccatagaattctctccaaagagtgcaaatgcctggcccctccccagtggaatttgtatagagatatgatgttagagaactatagaaacctggccttcctggctatgtattctttttttttttctttttgagatgcagtttcgctcttgttgcccaggctgggacgcaatggcacaatctcagctcactgcaaccttcacctcccaggtacaagcaattctcctgtatcagccccccaagtagcttggattacagacatgtgccaccacacccggctaattttttcgtatttagtagagatagggcttcaccatgttagtcaggttggtcacgaactcctgacctcaggtgatccaccgcctcggcctcccaaagtgctgggattacaggtgtgtgacactgcaccgggctggctatgtattcttattacaaccaaggcctttcacctgagcaaggcatagacgattcattctaaaaagtgacactgggaagatatgggagctgtggccttaaaaatgtacacttatggaaaaattgtgaaagtgtgggtgaaggtagagggcaaaaagaacgttataatgtacatagccaatattagacaactactcataacaaaattttaactgtgaaaggagatcaaaaacagaatattacagaagaaggctcagtttatgttggctacttctacagaagcatatgtttctgtaagtaaatatcaacatcaatttttgaagtccatctgttgtaatgaaaatcagaaaaactttaaccatgactcaaaaattagtaagcatcagagtactcattttctagaaaatgattataaatgtaatgaatgtgggaaagtattttattgatcctcaaaatttatttttcatcagagtatcctattccagaaaagcctgacaactgtaatgaatatggtaaaacttctagccagtccttaaaactttctcaacatcaaataattaacattggagagaactcacaaagatgtaacaaatgtataatagtctttagtcagtcatcacatctaaatagacataagttaatcaacactggagagaaatcattcagatgtaaataatgtggcaaagcttttacctgggactcacatcttagacaacatcagaaaatccatactggagagaaacccttcaaatataaagaatgcacaaagcctttaaccaatatgcacactttatacaacatcagagaattcacactggagagagactttttaaatgtaaagaatgtggaaaagctttaaactggggctcacaacttactcaacattagagactccatactggagagaaacttttcgaatgtaaagaatgtggcaaggcctttaacaggcactcaaaccttacttagtatcagataattcaccccagataaaaaccccacaagtataaagaatgtgccaatgcccaaaactagtgctcacaccttactcaacattagaaaatcaattctagatagaaatctaatacatgtaatgattttgaaaaaaatatttgctcaagatatataccttagaaaacaccacattatttatgctaaaaaacatttttacacatataaagcagttatcaaagcctttagctgttgcataaatcttacttgacagagagttcccatagcagagaacccatacaaatgtaataaatgtgaaaagacctttatccaaaatatataccctagaaaacatcagagtttatgctaggaagaaattacaggctcaataaatgtaggaatgtatttaataaaaattaaagtctaaattaaaatcagaagaatcgccctagaaagaactaaagtaataacactttgagacattactctaaatcagagtggttattacagagaataatccaaactcaaaataattaggtaattgtatgtttgaaaaaagtaaagacattgaatatgattatacctatccatcaatgtacacttttttataatgacagtatttgagattacatgaaaaaatattaatgtaattaaattcaaattactcttatttctttattccaactgtttttgtaaaagcatgtggtcaattgttgctacctccaacctatgagaggcccttctatattaggtaggcattatacacattaactctcccacaaaagatgaagagcattgacatgtacaacatatgataaagtgcatgtatgtttaaatctaaaatctaaatcttaaatctaaataaaggtgctctttttgtttgacttacagcagtgttttaagtcatgtatgagttcgctgttcagaatatcattgttccgcattaaagtatgggacagaaacacagtatgagacagttttagaaatattgctattaatagcaataaacaaatcttcacaaatatcacagaacagtgtaaataacttccctctgataagacatagactaattgtgaattcaactctgtaaatgcttggcctcagtttaaaaaatgaatgtagcacattttttcacatagatcatggtatcagaataacaagaatgtttgaatgtctacagtctgcattttatccatcaagaaaacagtagattttgaaatgctctattcagctatgtgtaaacttaatttgttttttaaaaaaataaaaataaaatggtttttaattttgaaaaaagaggctgggtgcggtggctcacacctgtaatcccggcactttgggaggccaaggcgggctgatcacgaggtcgggagatcaagaccatactggctaacacgatgaagccccgtctctactaaaaatccaaaaaaattagccgggctcggtggcggatgcctgtagtcccagctactcaggaggctaaggcaggagaatggcatggaactgggaggtggagcttgcagtgaacggagatcacgccactgcattccagcctgggtgacagagcaagactctgtctcaattaaaaaaaaaaaagaagtaaagatcacagtacatatataaatacataagtaaatttaaacatatagtcactgcagtgttcatttgtaatccctctttctcattttatttaaaagacaaatgcataaaacaataatccatgttaatgaatatataatgtacaaagatgtaatttgtaacaataacaaagtaaagagggaaattaagctctaaagaagtattatttttagccagacagtgcctcatgcctataattgcaccactttgggaggctgaggcaggaggatcacttgaggccaggagtttgagaccagcaagggcaaaagagcaaggcctcatatgtactaaaaattaaaaagaaaaaaattagccaggtgtgatggtctgtgactgtagtaccagctactcagaaggctgaggtgggaggattgcttgagcccaagagttcaaggttacagtaagctatgatcacaccactgcaccccagcctgagtgacagagcaagaccccaccttaaaaaaataaaataaaataaaaataaaggaatatcatctttgtacactattgaaactatattagtattaattcaaacttgattttatgaacctagatgttaattataatctgaagcataaccgctaagaaaaaaactttaaaatatacagaaaaagaaataagaagggaagcaaaatggtacagtaggacaactcaatcacaaaaaggcagtaatggagaaacagacaaataaaaacatacaacatacagaaagcaaatagcaaaatggcagaagtaggttcttcctcatcagttactactttagatagattaaactgtctaattataaggcagaatgggttgaaaaatccaactatatactttctacaagagacattagattcaaagacacaaataggttgaaagtgaaatgatagaaaaaggtatcccatacaaatagtaactaaagacagttggggtgggaaaactaatatcagacaatagaatttatgtcaaaaattttttttacaagagacaaagaaggacattatatattgataaaaggataaatctatcacaaagctataacaattataaacatacatgcacttaatgacagagcagcaagctatatcaggcaaacactgacaagattaaagggagaaatatagagttctacaattatagttggaattttcaatagcccattttcaataatggatagaacaattacacagaagaatattatcgaaataaaggtcttagatgacataaactaaacctaaccaacacatagaaaactctacccaccaacagcagaaatacacaagtacacacggaacattctccaggacataccatacaacaggctacaaaacaagtctcagtaaattgtaaaggactgaaatcatacaaagtatcttctcttaccacaatggaatgaggctagaaatcactaacaggaggaacactgttgcaaaatatgtgaaataagcaaatacatggaaattaagctacacactcataaacaatcaatgggtcaagaagaaattacaagggaaattttaaaatacttaagagatgaataaaaatggaaacagaacatagcaaaacctatgggatgcagagaaagcagcattcaaatggataggtatagctatacatgctagtattaaataaagaaaagagatccaaatcaataacttaactttacactttaggaagctagcaaaagatcaagctaaatccaaagttagcacaaggaattaaattataaagattaagagtggaggaaaatcggttgaaggaggtgtctcatgccttaaatactagcactttggcaggccaaagagggtggataacttgagtccagtagtttgagaccagcctggacaacatggcagaaccccatctctacaaaaatacaaaaaatgagctgggcgaggtggtgcacatatgtaatcccagctacttgggaggctgaggtgggaagattgcttgagcctgggaggtggaggttgcagtgagccatgatcatgccactgcattccggcctggacaaagactgagatcagaaaatttaaaaaaaatttttttaattaaaaaaatgagtagaggtaaatgaaacatagaaaagttaataaagccaaaagtgattctttgaaaaagatcaataaaactaaaattttttttgaactgattgaaaaaagaaagaaggttcaaacaaataaaatcagaaatgaaactggggacattactacagatcttgcagaaataaaaataatcacaaaagaatactatgggttgggtatggtggctcacacctgtaattccagcactttgggaggctaaggcaggtggatcacttgaggccagaaagtttgagaccggcctggccaacatggcaaaatgttatctataataaaaatacaaaaattagccaggcgtggtggcatgcacctgtaatcccagctacccaggaggctgaggcacaagaattgcttgagctcaggaggcagaggttgcagtgagctgagatcgcaccactgcactccagcctgggtgatacagtgagactctgttcaaaacaaaaaaaagaataatctgaacaattacatgccaataagataaccaacatgaaatggtcaaattcctagaaagatataaactaccaaaattgactcaaggagaactagaattagtcattaaaagtcaattacaaattattaaaatttcaatgtaagagattgaaacagtgattaaaatataacaaagaaaagcctgcagatggcttcattggtgaagtctaccaaacattcaaagaagaattaacaccaaattttcccaaactcttctaaaaaaaatagaagatgagacaaaaacactgcctaactcattctatgaggccaacattacattaataccaaagccagacaaagacatcacaagaaaagattatagatcaatatacctattaaaaaatacagaaatcctcagtaaaatgctagcaaatcaaatccagaagcatattaagaaaattataggccaggcatggtggctcatacatgtaatcctagtactttgggagaccaaggcaggaggattgcctaggcccaggagtttcagaccagcctgggtaacatggcgagacctggtctctacaaaaattttttaaaatagccaggcatggtggcacacacatgtggtcccagctacttgggggactgatacaagaggatcgcttatgcccaggatattgaggctcagtgaggcatgactgcaccactgcactccagccttggtgacagggtgagaccctgtctcaaaaaaaaaaaaaaaaaaaaagtaggaggtccgttccaagatggccgaataggaacagctccggtctgcaattcccagcatgatcgagacagaagacaggtgatttctgcatttccaactgaggtaactggttcatctcattgggactggtcagaaagtgggtgcagcccacggagggcgagccaaagcaggatggggcatcgcctcacctgggaagtgcaaggggtgggggaatttccctttcctagccaatggaagctgtgacagactgtaccgggaaaatcgggagactatgattctaaacactgcgcttttccaatgatcttagcaaatggtacaccaggagattatatcccatacctggctcagtgggtcccatgcccacagagccttgctcactgctagtccaagatggaactgcaaggtggcaagcctgcctgggggaggggcgtctgccattgttgaggtttgagtaggtaaacaaagcagcctggaagcttgaactgagtggagcccaccgcagctcaacgaggaccacctgcctctgtagactccacctctgggggcagggcatagctgaacaaaaggcagcagaaacttctgcagacttaaatgtccctgtctgacagctctgaagagagcagtggttctcccagcatggtgttttaggtctgaaaagggacagactgcctcctcaagtgggtccctgacccctgtgtagcctaacttggagacacctcccagtagcagctgactgacacctcatacagccaagtgcccctctgagacaaagcttccagaggaaggatcaggcagcaatatttgctgttctgcagcctccactggtgatacccaggcaaacaaggtccggagtggacctccagtaaactccaacagacctgcagctgagggacctgactgttagaaggaaaactaacaaacagaaaggaatagcatcaacatcaacaaaaaagacatccacaccaaaaccccatctgtaggtcaccatcatcaaagaccaaaggtagataaaaccacaaagatggggagaaaccagagcagaaaagctgaaaattctaaaaaacagagcgccccttcttctccaaaggatcgcagctcctcgccagcaatggaacaaagcaggacagagaatgattttgatgagttgacagaagtaggcttcagaaagttggtaataaacttctttgagctaaaggaggatgttcaaacccatcgcaaggaagctaaaaactttgaaaaaagattaaatgaatggctaactaaaataaacagtgtagagaagaccttaaatgacctgatgtagctgaaaaccacggcacgagaacaacgtgacacatgcacaagcttcagtagttgatttgatcaagtggaagaaggggtatcagtgattgaagatcaaattaacgaaatgaaatgagaagagaagtttaaagaaaaaagagtaaaaagaaatgaacaaagccttcaagaaatatgggactatgtgaaaagatcaaatctacgtttgattgatgtacctgaaagtgacggggagaatggaaccaagctggaaaacactcttcaggatattatccaggagaacttccccaacccagcaaggcaggccaacattcaaattcaggaatacagagaacaccacaaagatactcctcgagaaaagcaaccccaagatacataattgtcagattcaccaaggttgaaatgaaggaaaaaatgctaagggcagccagagagaaaggtcgggttacccacaaagggaagcccatcagactaacaccagatctctcagcagaaaccctacaagccagaagagagtaggggccagtattcaacattcttaaagaaaagaattttcaacccagaattgcatatccagccaaactaagcttcataagtgcaggagaaataaaatactttacacacaagcaaatgctgagagattttgtcaccaccaggcctgccttacaagagctcctgaaggaagcactaaacatggaaaggaacaactggtaccagccactgcaaaaacatgccaaatttaaagaccatcaatgctaggaagaaactgcatcaaacaatgggcaaaataaccagcgaacatcataatgacaggatcaaattcacacataacaatattaaccttaaatgtaaatgggctaaattctccaattaaaagacacagactggcaaattggatagagtcaagacccatcagtgtgctgtattgaggagatccatctcacgtgcagagacacatataggctcaaaacaaagggatggaggaagatctacaaagcaaatggaaagcaaaaaaaatgcaggggttgcaatcctcgtctctgataaaacagaccaacaaagatcaaaagagacaaagaaggccattacataatggtaaagggatcaattcaacaagaagagctaactatcctaaatatatatgtacccaatataggagcactcagattcataaagcaagtccttagagacctacaaagagacttagactcccacacaataataatgggagactttaacaacccactgtcaatattagacagatcaatgagacagaaggttaacaaagatatccaggatttgagctcaactctgcaccaagcagacctaatagacatctacagaactctccaccccaaatcaacagaatatacattcttctcagcaccacatctcacttattccaaaattgaccacatagttggaagtaaagcactcctcagcaaatgtaaaagaacagaaatcacaagaaactgtctctcagaccacagtgcaatcaaattagaactcaggattaagaaactcactcaaaaccgcacatctacatagaaactgaacaacctgttcctgaatgactactgggtaaataatgaaatgaaggcagaaataaagatgttcttcgaaaccaatgagaacaaagacacaacataccagaatctctgggacacatttaaagcagtgtgtagatggaaatttatagcactaaatgcccacaagagaaagcaggaaagatctaaaatcgacaccctaacatcacaattaaaagaactagagaagcaagagcaaacaaattcaaaagctagcagaaggcaagaaataactaagatcagagaagaactgaaggagatagagacacaaaaaacccttcaaaaaaatcaatgaatccaggagctggttttttgaaaagatcaacaaaattgatagactgctagcaagacaaataaagaaggaaagagacaagaatcaaatagactcaataaaaaatgataaaggggatatcaccgattccacagacatacaaactaccatcagagaatactataatcacctctatgcaaataaactagaaaatctagaagaaatggataaattcctggacacatacaccctcccaagactaaaccaggaagaagttgaatcactgaatagaccaataacaagctctaaaattgaggcaataattaatagcctaccaaccaaaaaaagtccagaaccagacagattcacagccaaattctaccagaggtacaaagaggagctggtaccattccttctgaaattattccaatcaatagaaaaagaaggaatcctccctaactcattttatgaggccagcatcatcctgagaccaaagcctggcagagacacaaacaaaaaaagagaattttagaccaatatccctgatgaacatcgatatgaaaatcctcaataaaatactggcaaactgaatccagcagcatatcaaaaagcttatccaccaagatcaagttggcttcatccctgggatgcaaggctggttcaacatatgcaaatcaataaacgtaatccatcacataaacagaaccaaagacaaaaaccacatgattatctcaatagatgcagaaaaggccttcaacaaaattcaacagcccttcataataaaagttttcaataaactaggtattgatgggacatatctcaaagtaataagagctatttatgacaaacccacagccaatatcatactgaatgggcaaaaactggaagcattccctttgaaaactggcacaagacaaggatgccctctctcaccactcctattcaacataacgttggaagttctggccagggcaatcaggcaggagaaagaaataaagggtattcagttaggaaaagaggaagtcaaattgtccctgtttgcagatgacatgattgcgtatttagaaaaccccgtcgtctcagcccaaaatctccttaagctgataagcaacttcagcaaagtctcagcatacaaaatcaatgtgcaaaaatcacaggcattcttagacaccaataacagacaaacagagagccaaatcatgagtgaactcccactcacaattgctacaaagataataaaatacctaggaatccaacttacaaaggatgtgaaggacctcttcaaggagaactacaaaccactgttcaatgaaataaaagaggacacaaacaaatggaagaacattccatgctcatggacaggaaaaatcaatatcatgaaaacggccatactgcccaaggtaatttatagattcagtgccatcaccatcaaactaccaatgacattcttcacagaattggaaaaaactactttaaagttcatatggagccaaaaaagagcccgcattgccaagacaatcctaagccaaaagaacaaagctggaggcatcatgctacctgacttcaaactatactacaaggctacagtaacccaaacagcatggtactggtaccaaaacagagatatagaccaatggaacagaacagaggcctcagaaataacaccacacatctacaaccctctgatctttgacaaacctgacaaaaacaagaaatggggaaaggattccctatttaataaatggtgctgggaaaactggctagccatatgtagaaagctgaaactggatcccttccttacaccttacacaaaaattaattcaagatggattaaagacttaaatgttagacctaaaaccataaaagccctagaagaaaacctaggcaaaaccattcaggacatagacatgggcaaggacttcatgactaaaacatcaaaagcaatggcaacaaaagccaaaatagacaaatgggatctaattaaactaaagagcttctgcacagcaaaagaaactatcatcagagtgaacaggcatcctacagaatgggacaaaagttttgcaatctactcatctgacaaaaggctaatatccagaatctacaaataacttaaacaaatttacaagaagaaatcaaacaaccccaacaaaaagtgggcaaaggatatgaacagacacttttcaaaagaagacatttatgcagcctacagacacatgaaaaaatgctcatcatcactggtcatcagagaaatgcaaatcaaaaccacaatgagacaccatctcacacagttagaatgacacttattaaaaagtcatgaaacaacaggtgctggagaggatgtggagaaataggaacacttttacactgttggtaggagtgcaaactagttcaactattgtggaagacagtgtggcaattcctcaaggatctagaactagaaataccatttgacccagcgatcccattactgggtatacacccaaaggattataaatcatgctactataaagacacatgcacacgtatgtttattgcagcactattcacaatagcaaagacttggaaccaacccaaatgtccatcaatgatagactggattaagaaaatgtgggcgcggtggctcacgcctgtaatcccagcactttgggaggccgaggtgggcagatcacgaggtcaggagagatcgagaccatcctggctaacatggtgaaaccccatctctactaaaaatacaaaaaattagccgggcgtggtggtggacgcctatagtcccagctactcgggaggctgaggcaggagaatggcgtaaattcgtgaggtggagcttgcagtgagccaagatctggccactgcactccagcctgggtgacagagtgagactctgtctcaaaaaaaaaaaaaaaaaaaaagaaaagaaaatgtggcacatatacaccatggaatactatgcagccataaagaaggatgagttcatgtcctttgtagggacacggatgaagctggaaaccatcattctgagcaaactatcacaaggacagaaaaacaaacaccatacgtcctcactcataggtgggaattgaacaatggaaacacttggacacagggtggggaacatcacacaccggggcctgttgtggggtggggggatgggggagggatagcattaggagaaatacctaatgtaaatgacaagttaatgggtgcagcaaaccaacacggcacacgtatacataagtaacaaacctgcacattgtgcacctgtaccctagaacttaaagtataataataaaaaagtaaattatatattataaccaagtgggacttatccttgcagtaatgcaacaatggctaaacatacaaaaaaaatcaatgcagtatgtcatacattaatagaatgaaagaaaaaacacatgatcatctcattttgacacagaaaaaatatttgctaatattcagcattcatcataaaaatatgcaacaaactaagcacagaagtgaaacccctcaacatgatgaaaggcatttgtgaaaaacctaccacttacattatattcaatggtgaaagaccaaaagctttccccctaagataaagacgtctaccttcatacgccatttaatatttcaatagaagttccagccagaacaattagagaagaaaaagaagtaaaagacacctagaaataaaagaaaatgaagaataaaagaaatgaaagggagaagttaacctatctttattagcagataacatgatcttgtatatagaaaattacaaggaatatacatacacacatacacacttagtagagctaataaactaattcagccaaattgcagtacacaagatcaacactcaaaaaaaaaataagttgtgtttctgagaagaaaattctaagaagccatttataatagcatcgaaaaggataaaatatttaggaatacatttaaccaaaaagttcaagacttaacacactgaaaactacaaaaatattgctaaataaaattaaagaaaagctaagtaaatggaagaacatcagtgcttatggattggtagacttaatactgttaacatgtcaatactctaaaaataatctacagagtcaatgcaatctctagcaacatctcagtggcttcttttgcagaaatgaaaaagctgatccctaaaagtcacatgaaattgaagggaccccaaatcaccaaagaaagtcttgaagaagaaaaagttggagaactcacactttccaatttaaaaacgtactacaatgctatcgtaatcaaaatagtgtggcattgccataaggatatatacacgtacagacacacaatgagacagtattgagattccagaaataaactcatacagatgtgattttttgacaagggtgccaagaacattcaatagggaaagcatagtctctttcacaaacaatgctgagacaactggatatccaaatgaaattggaaccctacctcacagcatatacaaacattaactcaaatcaaagatctccacataaaagagctaaaactattaaactcttagaagaaaacatggggtaaatatttatgaccttgcatttgtcaatgaattcttagatataataccaaaatcataagaaatcaaagaaaaaattagaccaaaggataaattagacttcatcaaaatttaaaacatctatgcatcacaggacatgatcaagaaagtgaaaagacaacctacagaatgggagaaaaatattctcaaatcatttatctgataagggtgtagtacccagattgtatttttaaaaactctcttatacttcaacaacaaacaagcacacagacacagggcccccctccccccaacacacacacacaagaatgggcaaagggcttgaataagactttctccaaggaagatacaagcacatgaaaagattctcaacatcattagtcattagggaaatgcaaatcaaaaccacaaggagaatcacttcccactcacaacgatggctataatttttttaaaaaataaaaagattggcaaggatgtggagaaattggtaccttcatgcattgctagaaatataaaatggtgcaagcactgtggaaaataatttagcagtccctcaataagataaacatagaattaccatatgacccagcaattttactcctatgcatacacctaagagaaatgaaaacatgtattcaaacaagactttgcacatgaatgttcatagcagcactattctcaaggaccaaaaggtagaaacaacacacatacccatgaactaatgaatgaatgtggtatatgcatacaatggaatattactcaatcacaaaaagaagtaaatattgataaatgctatagcacgcttgaaccgcaaaaacattatgcacagtaaaagtaaccaggcacaaaaggtcatacattatatgattccatttatttgaaatatttagagcaggaaaatccatagagacaaaaatcagattaatggttgccaggtgctgggggaaggagacatgggagtgactgcttaatggatatggggttctttgtggggaagagtgatgaaaatatcatggaattatatagaggtaatgggcccggtgccatggctctcatgtctgtaattccagtactttggaaggctgaggtgggctgataacttgaagccaggagtttgagaccagcctggccaatgtggcaaaaccccatctctactaaaaatacaaaaattacccaggcatggtggtgcgcacctgtgatcccagctacttgggaggctgaggcatgagaatcgcttaaactggtgaggtagaggttgcagtgagccaaaattgcgccactgcactccagcctgggtgatagagggagactctgtctcaataatagtaataataaataaataaatagaggtaatgaatggttgcacaacatggtgaatgtgccaaatgactctgaaacatacactttaaaatggttaagtttttgtgtaaattttacctcaatttaaaaaaaggaaaggaaaagactgatgaaaacaggactgaggatgatgatggcatgggtggaagcacattggtgggtggattaggaaggaggctatggttatatacaggttattgtcgagaatcaatttatgttggtggtagtggacatgagattctatcaccattattccatagttagcgcttattacattgttattatagattgttccagatggaaaaataaagtgagtcacgaaaggactaaggaacagcacatatcacgagacaagaattatggttgtgttaggccgtccttgcattgctataaaaaatacctgaggctgggtaatttataaagaaaagaggtttgattgactcacagttctgcaggctgcacaggaaccttggtactggcacctacttggcttctggggaggcttcagggggcatttattactcatggcagaggcacagccagagcaggcagcgggggtagggacagcaagcggtgagagctgcagcaagaggtgggggaagtgccacacacgcttttaaaccaccagatctcgcgagacttcactcactatggtgataacagcaccaagccatgagggttctgcccccctgaccaaaacacttcccaccagtccccacctccaacactaggtattgcctctcaacatgagatttttgatccaaattatatcaatgattagtcaattttaatgtaattaaggtccaaatcaaaactatttaaaatcacctgggggcaggggtggtggctcacgcctgtaatcccagcactttgggaggccaagcagggtggatcatgaggtcaggagattgagaccatcctggctaacacagtgaaaccccatctctactaaaaatacaaaaaattagctggccgtggtggcagcacctgtagtaccagctgcttgggaggttgaggcaagagaatcgcttgaacctgggaggcggaggttgcagtaagccaagatcgggccatggggtttcactgttctagcaaggacagtctcgatctcctgacctcgtgatccgcctgcctcggcctcccaaagtgctaggattacaggcgtgagccaccgggcccagcctgcgtttgactttgtaaccacagtgctacctagaggcctcatccactgaaagagaagcagaaaaaagaaagggagagggtacaagaaagggttcacgcttcaggatcgttatccagtagaggtgaatcagtttgcggagtcaaaagtaatcttccaaaactagaaagcaacaggacgtctcaagcacctctgggcttttaaagtctggttctcatatggaaatagaaaccaaatgtttcatactttttgtaccaaatggtgctgtggacttccaattactgaaactgtttcattgtattagagttcttttttaaaaaaataacatgtattgggtttttcgtataatgtatggtaactgtgagacaatttagaaaatacaaaaaaagaaaaacactatcatctttccactcataaataagtataattaatatattagtttatttcctcttgaaggaaacatatccacatatctatacaggtatagtcccctgtatgtattacttagatttaaaacttaaacagccaggcgcagtggctcatgcctgtaatctgagcactttggaaggctgaggcgggcagattacttgaggtcaggagtttgcgagcagcctggccaacatggtgaaatcctgtctctactaaaaatacaaaaaaatagctgggtgtggtggcaggcgcctgtaatcccagctatttgggaggctgaggcaggagaattactggaacctgggaggcagaggttgcagtgagccaagatggcgccactacactccaacctgggaaacagagcgagactccatctcaatcaatcaatcaataacaaacatagagagttacagtttcagataagatggcataggcagactccaccctgtctctcctactgaatgcagctgtaaaacctggacagactgcatggagcagctatttgagtactctggtaagtaaatagtattgagaggtgacagcgtgctggcagccctcgcagccttcctcgctctgggcacctcctcggccttggcgcccactctgcccgcgcttgagatcttcagcccaccgctgcactgtgggatcccctttctgagctggccaaggccagagctggcttcctcagcttgctgggaggtgtggagggaggggcgcaggcgggaacaggggcccgaggtgcttgcgggccagcgcgagttccaggtgggcataggctcgccagccccgcactcggagcggcaggccggcaagcccggggcaatgaggggcttagcacctacgccagcagctgctgtgctcgatttctcgctgggccttagctgcctccccactgggcagggcttgggacctgcagcccaccatgcctaagcctcccactgcctccgtcccgcttccaccccaggtgggctcctgcgcagcccgagcctccccaacgagggctgctccctgccccagggcgcccagtcccatcaactgcccaagggctgaggagtgcagtcccaaggcgcagaactggcaggcatctccacctgtggccccagtgcgggatccactgggtgaagccagctgggctcctgagtctggtggggacttggagaatctttatgtctagctaagggattgtaaatacaccaatcaacactgtatctagctcaaggtttgtgaacacaccaatcagcaccctgtgtctagctcagggtttgtgaatgcaccaatcggcactctgtatctagctaatgtagtggggacatggagaacttttttgtctagctcagggattgtaaacgcactaatcagcaccctgtcaaaacggatcaatctgctctctgtaaaacagaccaatgggctctctgtaaaatggaccaatcagcaggatgtgggtggggccagataagaaaataaaagcaggctgccccggcaagcagtggcaactccggtcccttactacggtgtggaaggtttgttctttcactctttgcaataaatcttgttgctactcactctttgggtccacactgcttttatgagctgtaacactcaccgcgaaggtttgcagcttcactcctgaagccagcgagaccatgaacccaccgggaggaacaaacaactccagacatgccgccttaagagctgtaacactcaccacgaaggtctgcagcttcactcctgagccagtgagaccatgaacccaccagaaggaagaaactccgaacacatccgaacatcagaaggaacaaactctggacacgctgactttaagaactgtaacactcaccacgagggtccgtggcttgattcttgaagtcagtgagaccaagaacccaccaattccggacacagtattaggcagatagggaaagaaaactagaattcaaagtaccactgaaatggcaataaggttcccattttttctccttcttgtatctccagtttgtactcacagaagcacaaaacccagaagtggccacgagggcccacatatagaaaactccagaagttctctaattctaactcagaagcaggaaagggaattcctctctttgagacagtaaggggaaactgcctgtagttgtttttctttgttctgttttcccaagccccagccccaggatagttccacaaaagcaaaatgattagtggaggcctgcaggaacctgaaactctgaggagaaactctatgactggagcagctgtggccccaagtaagtagagcaaacccctgttgctttttttgtccgtgtgtccaccaccatttggcttcagatgcagcacagtcatggaaagtgcacagtggagtgggggaactaaaacccaccaagaaaggggaatctgagaaatgagagaggaaattgctcaggaatgcaccaccatcgagttgtacgtgcatggaactcatgctaaacagtatgccaaagccactgataaagtgaaccaaaggagagctcactgctcaggtcccacatttatttctgtgttaattcaattcaactgtagttggagaacacgttttgtttgatttcaaattttttaaatttattaagacttgttttatgtcctagcataaatgatctttcctgaaaatatttgatatgtactactattgtcgggtggagtagtctataaatgtcagttagatcaagtgagttgacagagttgttcaagttctatatccttgctgagtttatgtctagttgttctgtaaattactaacagtcaggtattagagtctcccaaccattgttgaattgcatattcctcctttcaatttgatcatttttgctttatccattttaggactctgttaagcacatacatgtttataattgttatatgtcttcctgatgacttttattatgttactctttgattttaatatttttgtctttatttacatgatatcacttttccatgtctcttgtagacaatgtatagttacattttggtttcttatccagtctgatgaactctgctgaagtgttttatctcatttacatttaatgcaattattgatatggctggatttatgtctgctgttttcaatataacttttaaaattaaatgttcagagagacatcagtatgaattcatgcttagcttaaatagatacagattcatagagaaatatttatagatttatatacacatgggttagtatagacacataaatcagctgagaaggcttaaataaagcagcagacctcagtagcaactagcaaccagatcttggcttctataatcattctccaattaaagaagaaattcttggaaaaatagctgatcttagcactggggtagaaaatatacaagatgaacctgtagaatcttcatagtataagaaagcaaggaaaaactaaaaaaaaaagaaaaagatgtgggtatatcaaagggatataggaaccagctaaaagagctcccagtgaccaaagctgaaataatttgagtaataaagtagaatttataacctgaaatataaaatgaaactcgatatatccatcctgatataaagaagttatttaatacataaataaatctggacgaatagaccaatctcccatgcagaagaatttcaggttatttattttgatatttcacccttaatagagtataggtgggtgcggtggctcacgcctgtaatcccaatactttgggaggccaaggtgggtggatcacctaaggtcaggggttcaagaccagcctggtcaatatggtgaaaccctgtctctactaaaaatacaaaaattagtcaggatttgtggtggaacagaaaaaaagacattaggggaaaactgatgaaatctaaataaagtattaactttagacaataataatatatgaatattgtgcttcattccagctacttgggaggctgaggcaggagaatcacttgaacctgggaggcggaggttgcattgagcccagattgcaccattgcactccagcctgggtgacaaaagcaaaactcagtctcaaaaaaaaaaaaaaaaagtagaatataactcccactccttaagtctatgctgcacatagtaactttctttcaaaaagcacagcatgggaaaggaggaaaaaaagtaacttaacacagtagaaaactgacaaaacactacctcagccaagtgaccaaggtgaccaacatcaacagtgataagtcatcctgatgatagtttgtactgttgatattatgtgatgaaaacagcagtttacttttgtgtccttcctcccaaaaacacatcacctcactttaatcatgatgaaataatcaggcaaatcccaactgaaaaacattctttaaaatacctgactaatacttcccagaactatcacactcatcaaaacaagaaaaatctgaaacattgtcacaaccaagaggagcctgaagggacataacttctcaatgtaggatcctggaacagaaaaaaagacattaggggaaaactgatgaaatctgaataaagtattaactttagacaataataatatatgaatattgtgcttcattaattgtgacaaatgtatcatactaatataaaatgttaataggataagttgggtttaggttatacagcaactctctatactatctttgcaataattctataaatctaaaattgtcctgaatttttaaaattaaatatttatcttggctcattcacccttgcattcatttactcattgattttaattatttacttaaacagctgctatgtcccagatactgctctagtctctagagatacaaacagcaaataaaaccaaacatggttcctgctatcaaggtgcttaagtccagtggaaaagaaacaaagaacgctaagtgattgttaagtcatagaaggaataagtcactattttcaaaattaaaaattattttcttgaatcttcattataaaagactcaagacattaaaggtctgggttgaatatcacgcaatctgacaattgaaaatcaaggagcaggattttcaaagaggagcaaaaggcagttcttgaaccaaataatgaaatctctaggaggcagcccagcctcccaaccctaacagggacaattactgagtctagagtcaatatcagagggccagattggctgttgactctctgcatgccaggtctgtgctgggggacaaaatgtggagaggaagcatcatgccctgctggagtgctgcatgaatagtggttgtgcaggcaggacaggtagatgggcagcggtaccaggacaggctccactccagctgcaaaggggtccatgaaccttcccatcctcccatttctacattccactcattcattcctagaatacaaattaaacacgtactatatgccacactagggtaggccaaccacatgtgtgccaggtggattgggaaacaatattgcaggcaacaggaacaacatggactaagattcaggaggtagacagtgcataaaaccttcatgacatttcaagtggttcagtgaggctggggcacagagtgtgggttgacaaacagaaggggaggatactgagatggtggcagagggcagatcatgaacagttctgtgggtcctccaagtttacactttatcctgaggacaaagaaaagccaataaagagtttcaagcaaaagatgtgcctggatggggcatatagtcagatagggacttgtacagaaaccactctgctagctgctattgtgtggagactggactagacagggctgtcccagaggcagggagattgattacatggcagagtcagaaagtaggaggagtagaattggatacatcactggatgtaggaagcaaaggagtgggaggattcaggaatgacttctgacctgggtaaatatgcaggatgagtagtagagtaacaaagacaataaacacaaacattgtgtgttcccagcatgcatcaggcattgccagaggcaaatgttgatgctccagagggacttgggtgctctcagtgacctagtctaggtccctaacatgcaaatactggtattcccttctatgtgcatttccccagccttcttccgaggcaacaacttgctcaacaggtaataatctacaaaaaatttcaagtaaacattcttttatagatataaaatataaaaataatcccaaactctgataaatagagcaacttctacagggaatttttttttttttttttttgagatggagtctcgctttgttgcccaggctggagtgcagtggcgtgatctcagctcactgcaagctccgcctcccaggttcaggccattctcctgtctcagcctcccgagtagctgggactacaggcacccgccaccacgcccagctaatttttttgtatttttagtagagacggggtttcactgtgttagccaggatggtctcgatcttctgacctcgtgatcctcccgcctcagcctcccaaggtgctgggattacaggcgtgagccaccgctcccggctacaaggaattttaagaacatatgattctatattaaaaagcaatattccgaaggttgttggtatcattaagtaaacagtcctcattttacataagcaaacacactcaccaagataaatatccagctgaagtaaaaatggaaccagcatgggtgtgtttagaattagccagtaatttcagaggaaaaagcaggaatgggtggaatagaagagcagagtgttattggccagttcatctcccaatcaagggtaaccttggagaggggaagaaagaggattatacaagcataattgttgatagatagagtctatgaattatgcg

(The sequence listing continues in the following parts.)
